United States Patent Application Publication US 2026/0191916 A1 - sequence listing, part 29

SEQ ID NO: 84 - DNA, 6529552 bp, Bacteroides ovatus (residues 2,176,519-4,353,036 of 6,529,552)
  source 1..6529552: mol_type = genomic DNA
attagccttcaatgtttcgatggctttttccaagccgtcacgggccaataattccgtcggattgggaggaactgctccaccgggaagaataaacagattcttgttgatatcagaaggttgtaccaaatccatcagattaacagccggattagtcaaaaattgggtgataccttgttcttttctcgaaagattgaaaactttattcaatcccggtttgcgaatgtcaagacctactatcacaacctttttccctaacaaagaaagactaatagccaaattagatgatacaaaagacttaccttcaccactgatggtagatgtcaccagaatcacattcttgccattttcaagcataaactgaagattagtacgtacattacggaatgtctcgctcatcaggttattctgattctcaaatacagctatagaaccggactcttcatccgccaacgggatatcgccaataacaggaagagaagttagtttttcaacatcagcacggccctcaatcttgaatttggtcaatccaatcagataaataatacctaccggaaatcctactcctaataccaaggcggcaagatagaccatcatccttttaggagaaaccggattgtcgtccgctaacgcttcatcaataatcttggcattatttgctgtagctgccaaagtgatggcattctcttcacgtttttgaagtaacatcaaataaagaccagccttaatttcctgctgccgggcgatacttacgaactgacgttcctgggtcggagcgtcattaatgcgacgggaatagcggttcgcctcacgggcaaggtcttctttggttatctgcaatcctttcaatgtagcatccagcgtagcctgtacattgctccgcatcgcacggatactagtatccaaatttatgatcgtcggattattctcggttgatgtacggagcaaacgctttctttcaaccaacatttcattatatctgtctattgcaccagctgatgccgcatcctgtaatccaatattacttggcaagacctcatattcattaccttgcatatagcgttgcaaatccatcaccaaattgatttgagtctggttttccacacgcttcttttcatattcagcattaccggttaaggctatttgcgcctcactgctcaaatctgtaattccggcgctacgcttgaagttctccaagtcttgttctgtacttccaagttccttggaaataatgccgatacgttcgtcgatgaattctgcggttttttgggctacctcattcttgtcattattggcattgatattgtacatttcaaggagcttgttgatgaagtccttgccacgccaggtatttgagttctttaacgaaagaacagccacagaagtggtttttgatgtaggggctatcgacaaggactggatatatcctttggccacagacatcggccggtttataaaagcttttatatgacgctctttactttcctccttagcctgattggtcgtcaatgtatccttgctttcaaaaaaggcgaccgttccctcatcggtcgggaaaacagcaggtaatttatcaaattgcttccgatactctttgtctttcactgttatcaacgcatccatcccaccattgggaaataaagtcatctccacttccattggtgcagacaatttttccgcctcttgtggagtcaagctcaccactacgggcgaggtacggtaaagttccctactaggaaactcatcttcatccttataagtcacaaacagtcccagattgttaaccacttcacgggcaagagactttgatttcagcacctcgatttcattgtctacattgttcgacgaggaaacgaagccgtccagccccatcttttccagttcggaggacatgctcgcaccaccgcctttcttgtcatccttgatcaagactgtagcagatatattatagacaggagtaaccagacgcaggtagccccatgcgcaggcgatacagattattacagaaaccacaaaccaaggccaatggatcaggtaacggaaaaggatttcctgaatattcacctgctcttccggttgctccccccgattctctcttttttcctcaatcatatctatattactatttgaagattgttactaataaacttgccaatgataccagaatagaagtagcggagaaccacaagctggtactgttacctatatcggagttacgggcttttgctttattaggagtcacataaactatatcattctgctgtaaccaataataaggagaaagaattgtctccgccttgtttaaatccaatgtcacaatttcctgtttgccatcagcaccctcacgaatcagtttcacattatcacgaactccccaaaccgtcatgtcaccggccatggctagagcttccaacaagttgactttctcgttactgatggtaaacgtacccggacgggcaacctcacctaatacagatattttatagtttaccatacgaacagtaactatcggagtctcctttatgtaaggtttcagtttttctattatcagttgttcagcttctcttttcgtcaatccacccactttcaattcacccaaaacaggaaaattaatcttgccttcattatctaccagataaggttgtaaaacaggctgagtagtcaattgggtgctggcagtagccgcattggcgggagtagccaccgtcaagttgaacggaactgcaagttccggactagtacacgacaccacgatagtaagtaagtctttaggcattatctttgcatcatacaaattttcctgttgattgatgtcctttacaactcccgcatcctgcaaataaggtactttcttataagactggcaggaagcaagcagaaataccgctatcaagcaagaaaacagactttcatacaagcttcgtacattcaaatgcgtgcgcaatgatttattcatattaaatgataatttatttatagaatcttttgttaattatttcctatttattctttatctaatacttcaaatcgcggagaattttttgatttgaactccggaactatttttttcatcaaccgcacggtatccatgatctttaccgcacgcgacaacttttcaaattctgcataagtatcaagaatatcagcatattcataccgacgaactttagctatcatgattttcttattctctgtcggaatcgtattttctttatcgctcaacacctcttcatacaatttttcacccggacgtaatcccgtaaattcgatctttatgtcttcacccggacgataaccagccaattcgatcatacgagtcgccagatcaacaatcttcacagcttttcccatctcaaagacaaagatctcattaccctcacccatggtagcagcctccattaccaaacggcaagcttcgggaatggtcatgaagaaacggataatatcaggatgagtaacagtgacaggaccaccattctctatctgttctttaaaacgaggaatgacagaaccgttactacccaatacattaccaaagcgggtggtgataaatttggtatgacctttcacttttccttcacggatagcacatcccagactttgaacatagatttcagctaaacgcttggaacagcccattacattagtaggatttacagctttatccgtagacaccataatcatcttttcagcaccatattccacagccatatcagccacctgacgagaaccggtcacattgacaagtacagcttcacaaggattttcttccatcaaaggcacatgtttataagcggcggcatgaaaaacaatttgaggatgatacaattcgaataccatacgaacgcgttccttcacacgcacatcaccaatcaccggaacaaaatctatatttggatattttttctcaaactcaagacggacattatgcagaggtgtttctgcagagtcgaacatgataagtttctgaattcccatctgcactaattgacggcaaagttcactaccaatactgcctgccgcaccagtcaccaacaccacttttcccctgaattcttctgcaacctgacgaaggttgatattaatttcggcacgacccaacaaatcctcaatcttaataggacgtacccactgatgaaagtttccatcagaatccgcttcactgatagtaggagctatcaatgttttaagttcattgtttttacaatattccagaaggcgtttttcttccagacgggtatcttcataacgggcaaacagaatccccttaattccgcgcttccgcatgatataatcaacatccgattcattttcaaagtaataaacgggaagatctgccaatcggcgtcggctgttatttttaccatatacataaaaaccggttactttataatgtgcactatccctaagacgtaacttcaaggctacactctcttcattagtaccataaataagaatacgtgtgttctttttattcacccaatccaataaaaaatcatagacgattatcaatgatacacgaaaggtcgtcaagatcactaaagtcaataaaccatcaaatagaagataggatattttataattatatggcaattgggtctcatatataactccaaaagaaataatgaccaaacaggctattttaaataaaacggcacacatgatacgccaaagttcacgtgcctgtgagaaacgaattgtattacgataagtatggaataataaagagcccgcaacacttgccaccaaagaaacgcaagcaaatttacagagcatccagtcggtcattggaacatgcgccatataatgaattaccgcataagcgaccaacgaacataatacagaaattgccgtgtcaatacctaaaataacccaataactgaaataatttttgcggacatattgcactatgtccttcaatgttttttccattatagtataaatgaataaaataatatttcgaaatttgatttatctgattgattatgatcagtacaaggactatgactacgatttccatgttggtgtagcccaacaaagaatcccttcatctttcgatacgtacatacatttctacactatatcttttgtaaagatataattcataatactttatggatttttatttttgagagaggtcatcgataaatatatccactgtttggttaccgatgtcagatagactgcctgctattttacagactttcattacatttttgcagtaaaatccccatacccctataaaatagattgattactcaatcacgtaaatccccattttcagataccggctctacacacccagccggtatatctacacatgcacaccctaacattgtcaatcgaacagcaactttcgatttcccattcacatgtactaattccccttccaatcctgccaatggtcccttgattacccgtattttctctcccggagccaatggcgatgtactcatgctaatcgtctcatccgagtaatcgagcataaacttaaatcgcaacatttgttgatcaggaataacagccggagtactctccccacgtaataccatgtaacggctgatagaagataaagtcaggacttctttttgttcttgcagatcaacgtgaacgaaaatcatcatcggaagcagtacccggtcgacaattttacggcggtcgctccattgatggacttcttgttgaattggaaggaaattttcgatccccattttcgtaagccgctcacccgtttttttctcgtgacaaatacgtacgattgccaccaaccaacgttttgagcgcgctacgccgctgccaatcacatctgttggcagaagatttcgatcgtcatttttcttaatgatcatgtatttttacccctcatttttccataccccttaggcaatggattgaattcggtgacaaagatagataaaattataaatagtaaacaagaaaaaacgctttctttttttacatacaaatagaaatatacagttaagactatcttggacgtgaaaaatccgctatcacattggttctattttaccacccatattttgtacaacatccctaaacaaatcaggcgcggaatttccgcgcctgatttctattctttcgatttacttaccacttataattgataccgaagctaagcaattctttcaactggaagaagctgtctccttcagtcggtttcgagctatcgtcaaaacgggtatgtatatagagcttggtagaaagataacggttcaaaacgaagttgaatgtattttcccattctacacgtgcccaatgatagttggtcagataattgagacgagactctaaagttactgcagagatgatggtccagttcaatgtggattgcaactgggaaccaaagtcgtttttagagcattttcctttgtctaagccaaactttgtttcgtctacttcagaattaccgatataacgcaagttataagtcaacggcgccataaacacagaaagattaaatttcttcttactcaatttataatccataccgacactgaccgccaaatctgccggagacatgaaagatgaaaccaattcttcgctgttagctttatatccgttgaaaaactgtgtcttaaactcggacgaaatggtataataccaattcttgaaagctctcaaacctaatttattatacaaacgaaattggtctgtattgaacagatatttatggtattcatctgacggagtggaagtcatacctactttagcttccagctggttctcaaacagcaccttttcattgtcattatagttggcgaaaatctgaaaagtggctaatccggagaagttactttcacctcccttataccagttatccgaaaggtggttctggctaatctgcaacgatccgttacctccggtcacccaccagttcggccgactaatcttcatattggctttccctacattatcatccatattttccggttgaaacagatgaataacgtttgctttgggagatattttcggcttcacatcgtgacggaatacatcacgactcatgatgcggtcttctgtagtgacaaccaagttcggacgttccaaataaagatccatcaatgcactgttcactattttctcggcacgctgggttttggtaaatgccagggtatcataaggcagaagttccgctgtcagttgaggagtggtgtcccattgcataggcttccattccaatttcgaatattgtgccatcggagcataataatatgccaatggtgtgaacagacgaaaataatcgggatcagacggaatataacgtggcggcacagacagatcgttcaaataatctaattgcgcgacatacttattatataaataagaaacggtatccagtttcggagtcggccccgacatattcagtttgagcatcaaatatttctgaagctccgccgaaagcgtatctgctttcacgactctggcttttgccacaactgttgaagatttaaccgttttggcaggtttaatcgcttcaggagcaggctgcagagagtcagtcggaagtggagagggatcgacagattcctgtgcaaaaagcgataacgataagattgacagaataaacgctgaacataaagtagtaattctcatcatatttgtctatggtttagagtgcaaagctacattattttgttcagaaatcataggattcttttaaaattgcattttttaataaaattgtggagacgaaagactgtaatcttcctcttttttttataattttgcggtttttaagttcgtaagaatactactaagtaaacaattattaaaacagttatagctgtgggagaaacaaagtatattttcgtcaccggtggtgttgcctcttctttaggaaaagggatcatctcatcatccatcggtaagttgctgcaagcaagaggttataatgtaaccatccagaagtttgacccgtatatcaacatcgacccgggaacattgaatccttatgagcacggagagtgctatgtaaccgtagacggacacgaagccgacctcgacttgggacactatgagcgattcctgggtatacaaacgacaaaggcgaacaacattactacgggacgtatctacaagagcgtcattgacaaggaacgtcgtggagattatctgggtaaaacgatccaggtgattcctcacatcacagacgagatcaaacggaatgtaaaactgcttggtaataaatacaagtttgattttgtgattactgaaatcggtggtacggtaggtgacatcgaatcactcccctacctcgaaagtatccgtcagttgaaatgggaactcggtaagaacgctctttgcgtacacttgacctatgttccttatcttgctgctgccggagaattgaaaacaaaaccgacgcaacattctgtaaaggaactccaaagtgtgggtattcagccggatgtactggtactgcgtgccgagcatccgctaagtgacggactgcgtaagaaagtggcacaattctgtaatgtagacgataaagccgtcgtgcagtctatcgacgcggaaacaatttacgaagtacctatcctgatgcaggcgcaagggctggacagcactatcctcgaaaagatgggactgccggtaggagaaactccgggactcggcccatggcgtaaattcctggaacgtcgtcacgctgcagagactaaagaaccgatcaatattgcactggttggaaaatacgatttgcaggacgcttacaagtctatccgtgaagctttatcgcaagcgggtacttacaatgaccgcaaagtggaagttcatttcgtaaacagcgagaaactgacagatgagaatgtagctgaagctttgaaaggtatggcgggcgtaatgattggtccgggattcggtcaacggggtatcgacggcaagtttgtcgctatcaaatatacacgtacacatgacattccgactttcggtatttgtctgggtatgcaatgtattgctattgagtttgcacgcaacgtactaggatacgcagatgccaactcacgtgaaatggatgaaaagactccgcacaacgtgattgatatcatggaagagcagaaagcaatcaccaatatgggtggtacgatgcgtctgggtgcttacgaatgtgtattgcagaaaggttcgaaagcatatcaggcttacggacaggaacatattcaggaacgtcaccgccatcgctatgagttcaacaatgattataaagaccgatatgaagctgccggcatgaaatgtgtaggtatcaacccggaatcggatctggtagaaatcgttgagatcccaactttgaaatggtttgtcggtacacagttccatccggaatatggtagtacggtactgaaccctcatccgttgttcgttgcatttgtgaaagctgccatcgaaaacgaaaaagcaacggtgaacggctaacgatacgtggtaaacaaccggtagtttgtaatttatataatttgtaattaaaataagaatggataaaaacaccatcacaggtctcgttctgataggtatattattggtaggattcagttttttgagccgtccaagcgaggaacagatagctgcgcaaaagaaatactacgattctattgccgtggtacagcagcaggaggaagcgttgaaggctaaaacggaagctgcactggctaacagtcaaaaagaggtggcatcggctgccgattcttctgctttgtttttcaatgccttgcatggaaccgactctaaaatcagcatccagaataatgtagcggaaatcactttcacaaccaaaggcggacgtgtctattcagccatgctgaaagattatatggcacaagacaaaaagacgccggtcatgttgttcgacggtgacgatgcttcgatgaacttcaacttttacaacaaggcaggagccatccagaccaaagattatttctttgaagctgtgaacaagacggacagtagtgttacaatgcgcctggctgcggatagcgcaagctatatcgatttcatctatacgctgaaaccggatagctacctgatgaactttgaaatcaaagcgacaggcatggaagacaagttggctagtactaagtatgtggacatcgactggtcacaacgtgcccgccaactggaaaaaggattcacttatgagaatcgtctgtcggaactgacttataaagtaacaggtgacaatgtagacaacttgtctgctgccaaagatgacagtcaggatttgccgggacgcattgattgggtagctttcaagaatcagttcttctcgtctgtatttatcgctgaacaggatttcgacaaggtttccgttaagtcaaaaatggaacaacagggaagcggatatatcaaagattattctgctgaaatgaatactttctttgatccgtcaggcaaggaaccgacagagatgtacttctacttcggtccgaaccactttaagacgctgaaagcgctggataaaggccgcgacgagaaatgggaacttcacagactggtttatctgggctggccgttgattcgctggattaaccagtttatcacaatcaacgtattcgactggttatccggttggggattgagcatgggtatcgtactgttgattctgaccatcatggtgaaagtcgtggtttatccggctacctggaaaacgtacatgtcttctgccaagatgcgtgtattgaaaccgaaaattgacgaaatcagcaagaaatatccgaagcaggaagatgcaatgaagaaacagcaggaggtgatgggtctttacagccagtacggggtaagcccgatgggcggctgtctgccgatgttattgcagttccctatcctgatggctttgtttatgttcgtgccgagtgctatcgagctgcgtcaacagagtttcttatgggcagacgacctttctacttatgacgctatcatcacattcccattccatattccgttcctgggcaaccaccttagcttgttctgcttgctgatgacggtgacaaacatcttgaacacgaagtacacgatgtctatgcaggataccggagcgcaaccacaaatggcggcaatgaaatggatgatgtatctgatgccgattatgttcttgtttgtcttgaacgactatccgtcaggtttgaactattactacttcgtgtcaacgctgattagcgtgggtactatgattctgcttcgtaaaacgaccgacgaaactaaattgttggctattcttgaagcgaaaaagaaggacccgaaacaaatgaaaaagaccggatttgctgctcgcctggaagcgatgcaaaagcaacaagagctactgcaacagcaaagacagaataaaaaataaggaattattcctgaatcatattctaagaaagccggacaccctattttggttgcccggctttctttctctaaacaatataataagatgaaaactaaatattcgtataaacaaatctggacgatcaccttccctatcctgatcagtctgattatggagcaaatgatcggcatgacggacacggccttcctgggacgtgtgggagaaatcgagctgggtgcttctgctatcgcaggggtatattatctcgccatctttatgatggcattcggcttcagcatcggcgcacagatcttaatcgcccgccgcaacggagaaggaaactacaaggaaatcggaccgattttctatcagggcatttatttcctgcttgccatggcagtgattttattcacattctccatcgtattttcaccatatatcttaaagaatatcatttcgtctcctcacatttacgatgcagccgaaagttatattcactggcgtgtgtacgggttcttcttttcttttgtcatggtcatgttccgcgccttctttgtaggtacgacacaaaccaaaacactgacgctgaactctatcgtaatggtgctttcgaacgtggtattcaactatatcctgatcttcggtaaattcggtttcccgcaactgggaattgccggtgctgccatcggttcgtcactggccgaaatggtatcggtgattttctttatcatctatacatggaaacgaattgactgcaagaaatatgcgttgaacatattgcccaaattccatggaaaaacactgaaacgcatactgaatgtttctgtgtggacaatgattcagaatttcgtttctttgtctacctggttcatgttcttcttgtttgtggaacatttgggagagcggtcattggcgattgccaacatcatccgcaacgtgtcggggataccgtttatgattgcaatggcatttgcttccacctgcggttcattggtaagtaacctgatcggtgcaggcgaacaggattgtgtacggggaactatcaaacagcatatccgtatcggatatatctttgtattgccgatcctggtattcttctgtttattcccggatctgattctgcgcatttatacagacatcccggatttaagggcggcatccgttccttcactgtgggtactatgttctgcctatctggtgctggtgcctgccaatgtgtatttccaatcggtatcaggaacaggaaatacgcggactgcattggctatggaactttgtgtactggctatctatgtcacctactcggcatatttcattatgtacctgcagatggacgtcgcttttgcctggacaacggaatgtgtgtacggtacttttatactgttgttctgctactggtatatgaagaaaggaaactggcagaaaaagaagatttaaatccttttttcactatcttcgcaagaaaataaacattttataaaatatatgagacaagctaatttatttatgatgtcggcagcaatgttgttagctgcctgcggaggaacgaaagacgcaggcaaaacagatcaggtgcttatcgagaaatcggatattaagatcgaagggaagcgcatgactcccgaagcactttgggctatgggacgtatcggcggattcgccgtatcgcccgacggaaagaaaattgcgtatacggtaacgtattacagtgtaccggaaaacaagagtaaccgcgaagttttcgtgatgaacgcagatggaagcgaaaaccagcaaatcactcataccccgtatcaggaaaatgaagtgacatggattaaaggaggcaccaaacttgcattcttaagtaatgacaacggaagcagccagctctatcaaatgaacccggatggtagcggacgcaagcaattgacccactacgacggagacatcgaaggttattccatttcgccagatggcaaaaagctactgtttatctcacaagtaaagacgaaagaaagcactgctgataaatatccggacctgccgaaagccacaggtatcatcgtgaccgatctgatgtacaaacattgggatgaatgggtaacgacagctccacatccttttattgccgacttcgacggtaacggtatttccaatatcgtggatatcctgaacggagaaccgtatgaaagtccgatgaaaccctggggtggcattgagcaacttgcctggaatacaacttcggacaaagtggcttacacttgccgtaaaaagacaggactggaatatgcgatttctaccaattcggatatttatgtctatgacctgaatacccaaaaaacggaaaatatcacggaagaaaacaaagggtacgataccaatccgcaatactctccagacggcaaatatatcgcctggcagagtatggaacgtgacggttacgaagccgacttaaaccgtctgttcatcatgaatttggaaaccggagagaaacgttttgtgagcaaagcattcgaatcgaatgtagacgcttttgtatggggagcagatgcaaagatgatttatttcacaggtgtatggcatggagagtcacagatttatgcgcttgacctggcaaatgattcggtaaaggccattacttcaggaatgtacgattatgaaggtgtagctcttttcggggataaactgatcgccaaacgtcattcaatgagcatgggtgatgaaatttatactgtggcactggatggctctactactcaactgacgcaggaaaacaagcagatctacgaccagttggaaatgggtaaagtggaaggtcgctggatgaaaacaacagatggcaaacagatgttgacatgggtaatctatcctccgcagtttgatccgaacaagaaatatccgactttgctgttctgtgaaggaggtccgcaaagtccggtaagccagttctggtcttatcgctggaatttccagattatggcagccaatgattatatcattgttgctccgaatcgtcgcggcttgccgggatttggcgtggaatggaacgaacagatcagtggtgactacggtggccagtgtatgaaagattatttcactgctatcgatgaaatggcaaaagagccgtatgtagacaaagatcgcttgggatgtgtaggtgccagcttcggaggattctctgtatactggttggcgggacatcatgacaaacgattcaaagccttcatcgcccacgacggtatcttcaatatggaaatgcaatatctggaaactgaagaaaaatggtttgccaactgggatatgggaggcgcatactgggaaaaacagaatccggtggcacagcgtacgtttgccaactctcctcacctattcgtagagaaatgggatactcctattctctgtatccatggagaaaaagactaccgtatcctggctaatcaggctatggctgcttttgatgctgccgtgatgcgtggtgttcctgcagagctgctgatttatccggatgaaaaccactgggtattgaagccacagaatggagtgttatggcagcgcacattctttgaatggttggacaaatgggtgaagaaagctccgtctaaataaaattttacgttaattacatagtagaataaacatagtaaactaaaagaagcccctgttctcaatcttttgagttcaggggcttctccattgcattcatcaaaatcggctaaaattataaaaaagttcgctaaatttactccgaataaatattttcaatttctacaatatacatcttatggaaacctccatgagcaccaccgtaccacttttctattgattctttatccagaaaacattccggtttgatagtgtcagcataaagtttcttacattccagactcaaacgtgcctgctcgaacaggacatttcctttttctgtaaatacaggtttcaatccggtttcttttactttatccatattacgtcccgacttggaaccacaaacagcgtgaattttcttattttcttctcctaagaaagaaagtgtcaggtaatcgttcttctctacaaactcgtatgtataccgttcgggacggataaaaacgaaagcaaccggtttattccacaaccagccgatgccaccccaacttgctgtcatcgtgttaaacttctcttttgttccggctgtaaccagcatccactcttttccaatcgcttcgaaaaaattttctttcaaatcttttacttctaatttcttcatctctttattcgtaaatatgtattcataattagtttatataataatttaggcacggattacacagattaacacggttactttgcaacaataacaacactaaaaaccgtgaaatccgtacctagaaaaataacgattaattcatggcaggtacttatctaattatttctgtttattcaatttcacaatctctcccaaatagggaatcttcaccggaatcttccgtttcttagcctctgttgcgaagactttcgggggatcatgcaaaggctcgtcagacaaatcaaatgtgccataatgcatgggaatggtaagcccagcatgcatttcctcggcggcagtcaatgattcgtaaggcgatatatgattgggacgcataaaccagcgaggtttgtatgccccgatgcctaacaaagcataatccggtgctccgaacagatcgggaatctcacggaagtgactggaataacctgtatcaccgctataataaagagaaattccatttccttgcagcatgaaagctccccacagtcgctggccaccatcacgtacggaacgtttgctccagtgttgtgccggtagaaaagtaatcttcaatccctcatcttccatttgttgataccatccggcttcaatcactttcatttcgggaaaccatccctgaatcagctcaccggttcccaagccgcaaaagagtttcatttgcgggttattcttcagtaaacgggctatactctgtttatccaaatgatcgaaatggtcatggctgacaagtagataatcaatccctgtaaatatgtcaggattagcgggaaactcgctctgtctcttcacaaaaggaatactgccgaacacaggatcgaacatgattcgtttacctgctaactggagaaagaaagaattatgtccgagccatatcagggaatctcccaccaccgcatccaatgaacggagataacaaactttcggatcccatttcaccgttttcttctctttgcgttggggattgggcgaaagacgccatttcagtacactccccatccccggacggaagcgatgctgccgattaaaaaaacgcccgcgcaccatcggatttcctctccaataagggttgactgtcgctaaacgttcgtttctcctaaaacatatatgttcacccatttttatttcctgaatacgtatttacaaacttactaaaaatttctcgatttacgatgaattagagtaaacaaaaaatgtaccccggacacactatcggggtacatttacttataaaggaataaatattatccttttttaatagaatgagacttcgttaagagcagtgcaagccatacaaaggcagttgccagccaagagctgaaagattaataatcattatgactgcacccaatatccatagaatcaatagcgaccatttcaaacccgttcccatcggtgaccaatggaataattgccgcaagatagtatacaagaaagctcctaacggaatgccgatgagggcaactccggcaatcgtacctagcagtgtcatcattggagatacggaagcaaccggcatccagtcgatggcaggcagcatctcgtaaagcagtgctcctccgctaactgccacggcaattgctgcaaacaccagtgctaccagtacaacggccagtacgaacaagacagggcagcagagaatgacaagagctaccagaaatattttaaagagaacagcagcaatggaaacaaatacatcgcctatcttttgaagaaaggtacgaggtttgccggagttcatatagttgttaactccgtccgctacacgttcgaaaccgtctgtcactgttttgccaatattctcaatggtcactgcttctccacgcatactcaatttttccgcggcagtacgggcttccggaataacgatccatccgataatataaagtataatcatcgggcaataaggtacaaataccaggataatcatcaatatacgcactaatgtgatatcccaaccgaagtaagctgccaaccctgccgctacgcctcccaacaatttattatccggatcacgaaaccagcggcgttgagcagcggtttgcgtactgccttgattagcggacgatgtttgttccgttcttttctgtgagtccatatcctcatcagcaattccaaagtcttccggtttgccgacacgagcgataatttcttctacatccgaaactgtgatgacctgttttccttcagttactttctctgcaaacagttcggcaatacgcatctcaatatcgtttacgatctcttccgcaccctcctgtttacgaaagtaatgcttcaaattagacagataattatctaacaatcggtaggcatcgtcatctatatgatagacaattcctcctaaatttatggtcaatgtctttttcatttttatttcttctttttcggattatctattggctatatgattcactgtatcgttaagttctttccaggaaatttccagctctcccaaaaagacttctccttgttcagtgagtttatagtatttgcggggaggtccctgggtagattccacccactcataacttaacaggtcatcatttttcagacgggtaagcaatggatacaaggtgccttccactacaatcagttgggcttctttcaatttctgaataatatcagaagcataagcgggctccttgtgcaacaaaagcatgatacaatattcaagcatgcctttcctcatctgtgattttacattgtctactttcattattcacttcttttagatgcacaaatatatgcattactttagtaccttgcattgcaaagtactataaattaataataattaaaacattagagactctccaccttattataaaaagaaataatggctatatttgtgcccgttaaaccaagaaatagaaaatacgtatgtttacaattcgaaaagcaacggtagccgattgcgagcttattcataagatggcaaaggaggtattccccgccacctacaaggaaattttatctcccgaacaactggattatatgatggactggatgtatgctccttccaatgtgcgcaaacaaatggaggaagagggacatgtgtactccattgcttataaggagaatgaaccatgcggatacgtttccattcaacaacaggaaaaggatgtattccatcttcagaagatatatgtcctcccccgttttcagggtacgcattgcggcagttttttattcaaggaagcaatcaagtgtatcaaggagatacacccgggatcttgtttgatggagctcaacgtaaatcgtaataataaggctttgcagttttacgagcacatgggaatgagaaagttgcgggaaggtgatttcccgattggtaacgggtattatatgaatgattatattatgggactggatatttgatatacaaacaaaatgccccggaacatttatgatacttgttccggggcattttgtttatttagttaatggcaagattttatttcgctacacgttccagccattttaacatgaaaatcattgtaaacattgaaatcgtacaagctacaacaaacacagtccatgtcatccaaataggaattgattcgtacaggatagcaccaatcactagcaactgattacccagtgctgttgctcccagccatcctccttgcataataccttgatatttaggaggagcaaccttagatacaaatgaaattcccaatggagagatatacagttcagctactgttaagatcagataggtcagcatcaataaaaatggagtaactttcactggtgaagttccaacagctacaatatcctcatgcaacggcaaattagcaaaataagatccgactgccattacaataaatgccaatgcagcaattcccataccgatggcaatctttttaggagtcgaaggctctttaccacgtctacgctgacttgcaaaaatagccataatcaccggagtcaggaacactacaaaaaatggatttaacgattggaagagctctgctgaaataggcataccaaacagattcaagtcagtatattctttcgcaaaataagtcaaagtcagaccattttgatggaatgaaaaccaaaagaaaataacaacaccaaatacagcaaacagagcatacatacgttgttttacttcctgtgcactcatttctacaactgtagaagatgctgaagaagcaacggtctttttactgggatccgggaagtttttcttattcaaccaataaatggttaaagaaatagccatagcaataatagctaccccgaatgcgtaatggaatccagtagtaaagacattcaaataatctgaagcgaaagccgtatagtcttgtacaggagcagtagaagctttggtaactaaggtatgataagtttcagtagcttcaggcgacaaagtacctgctaattgaccatggcacaaagcaggaagatcagcatcataattataaccgaaagtagataaccaccagttacgcacgcctacagctgcaaacggagcaaaaatagcaccgatattaataaacatataaaataaagagaaaccggagtcacgcatgttggcatattgaggattatcgtacatctgtcctaccaatgcctgcaaatttcctttaaataatccgtttccaaatgcaataacaaacaaactagcacaagtaataaccagatagagcatcttgttatctaccggagtcttagatggaatagccaataataaataaccaactgccattaacacaattcctgtgaaaatagttcctttgtagttcctcgtcttatcggcaataatacctccgaccaacgccaaaatgtaaatagaaaaataaaaagttgagtaaataaatcctgcttcttttccattcattccaaacttggcttgcaagaaaagcacaaggatagccatcatagtataaaagccaaaacgctcacctagattggctaaagcggctgctatcagtcctttagggtgtttgttaaacatagaatataaattattaaattaatgatttaatggtcgataccacatatattttgcaaatatatactttttctcgagtttttgcacaatgatttgttaaactactcctcaaataaacgacaaatttccgccctggattcacgaatcaaatcttccggagctatttttatctgaagtccccgtacaccggcacttacataaatatacggaaattgctggctggtttcatgaatataagtaggaaaatgctttttcataccgatcggcgaacaacctccccggatatatccggtaagtggcagaagttcttttacgggaatcaactcgcacttcttgttacccgaagctttagctgccagtttcaaatcaacttcatgttctcccggaatgacacagacaaaatatccgcttttatcgccgtgcagaacaagcgttttaaagacctgctcgatgttctctcctaaacttgctgccacatgaacagcactcaagtcgttttcatctacttcgtagggaattaattcataggctatcttagccttatctaacagccgtgcggcatttgttttattgattttcattttcgttgtatttataagttctgtatctgataaataaagaatatgatatgataagtgccaactcatcgaagattgtccgataagttggcactctatgatttaaattagagacccagctcttcgcgaagaaacttaggtgtatatcctttagggctcttcgcaacttcttccggtgttccgtaactaaggagttctcccccgcccttaccaccttcagggcccatatcgataatataatccgccattttaatcacatccagattgtgctcgatgacgataacagtattacctttatctacaagcttattcaatactcccatcaatacacggatatcttcaaaatgaagtccggtagtcggttcgtcaaggatataaagagttttgcccgtatctctttttgatagctccgttgccagtttcacacgctggctttctccgccggaaagagtggtagaagattgtcccagttttatatatccgagtccgacatcctgcaagactttaatcttattcaagatttgcggcacattttcaaagaattccacagcacggttgatcgtcatgtcaagtacatcggcaattgattttcccttgaaacgtacttccagtgtttcccggttataacgtttaccgtgacaaacctcacaaggcacatatacatcaggaaggaaattcatttcaatcgtcttataaccatttcccgtacatgcttcacaacgcccacctgcaacattaaaggagaaacgtcccggtttataaccgcgaatcttagcttccggcagacccacaaacaggttacggatatcagaaaacacaccggtataagtcgcaggattggagcgtggcgtacgtcccaaaggtgattgatccacatctactaccttatctatattttccaacccttcaatcgaatcgtattccaaaggatcttgtaaagaacgatagaatttctgtgaaagaatcggctgcaaagtttcattaatcaaggtggattttccacttcctgatacaccagttacgcaaatcagtttacccaacggaaattcaacatctacattcttcaggttattccccttcgctcctttcagccagatagatttcccatttccttttctacgcttggcagggatttctatcttcatcttgccattcagatattgcgaagtcattgtatctgtattcagcatctcctgcggggttccggcgaaaacgacttcgcctccgagacgtccggctttcggacccatatcgatgacataatcggcagccagcatcatatccttatcatgttccactacaatcacggagttccccatgtcgcggagttctttcaacgagttgataagacgcagattatcacgctgatgcagaccgatactcggctcgtcgagaatataaagtacattcactaattgcgaaccaatctgtgtagccaagcggatacgctgactctcaccaccggaaagactaacagagctacgattcaatgccagataatccagacccacgtccagcaagaacttcaaacgtgtgcgaatctctttcagaatctccaccgatattttcttctgcttatcggacaggaactcatccaccttcatcaaccagtcgtacaactcgttgatgtccatattcgccaactcattgatattcttatcatggatacgaaaatgcaaagcttctttattcaaacgagcccctttacattcgggacaaaccgttgttttggcaaattgttccgcccatttctgtgctgttgcagaagcatccttttcctgcaacatctgaatatacttcaccactccttcgtaagtaacaaagtaatcggaggaagtaccgatcagcgaactcttgattttaatccgttcatcagaaccgtacaagacttcatcaatcgcatcgtccggcaactcctttatcggagttttcagtgttgcgtcgtacttctcgagcaaagcaccgatttgccagaaaatcatcgcattcttatattttcccaaaggtgctatcgctccttcataaatggaaagttcacgatcgggaatcactttgtccacatcaatctgattgactactcccaatcccttacacttcggacatgccccttgcggtgaattgaatgagaagttatgcggagccggttcacgataagacaatccggtgacaggacacatgagccgcttactataatgacggatgctttcagactgggcatccagaatcatcatcaacccatctccctggcgcatagcggttgccacactctgtttcaagcgccggtcatctttctccgctaccactaatttatcaataaccacttctacatcgtgatttttatagcggtcgagtttcatgccatgcgttatttcacgcacttcaccgtccacccgtacatacaggtatccttttttacgtatttgttcgaaaagttccctgtaatgtcccttacgtgaacgaactagcggagccagcagatatattttctttcctttataatctttcagaatcaagtccagaatctgctcttcggtatatttcaccatctcctcacccgacagatacgaataagccactccagcacgggcatacagcaaacggagataatcatatatctccgtagtcgttcctacggtagaacggggatttttattcgttgttttctgttctatggagataaccggactcaaaccagttatcttatcgacatccggacgttccagattgcccaagaagttacgggcatacgctgaaaaagtttcgatataacgacgctgtccttcggcaaaaatcgtatcgaaggctaaagaagattttccactaccgctcaatcccgtgataacagtcaaactgttacggggaatttcggcatcaatatcctttaaattgtgcacgcgcgcaccgtacacattaatatattctgtttcctgcatattcatatccttccataaatgttgcaaaattaatgtttccgcccgaaatatgctcctaaaaaagcacaatattattttcttaactcaaatcttatgaagatatagggcattatttgtacctttgttccttgatttcaagaaccaatagttataatttgatgaaaccgataaaccgtatattcttatttctgctttttataagcgtttcatatgctatcagttatgcacaggaaaaccaatcatatttcttgcataccatcgaaaaaggacaaagtttatactccatctccaagatgtataatgtcactacatcagacatcatacgtctgaatccgggctgtgacgaaaagatctatgccggacagacaatcaaaattcctacgggaaaagagagtcagaagggagaaacattccatacaattcaagccggagaaacactatacaaactgacaaccatgtataatgtatccgccaaagatatttgtgaagcaaaccccggtttgagtgccgaaaatttccgtatcggacaggttatcctgattccacagaaaaaagaagagcaaactgctactgcaactcaaacgcctaccgaacagaccaccattcaaggtcctgttgttccgaaatgcaaggatatgcataaggtaaaacgcaaagagactatttttagcgtgagccgtgaatatggaatcagcgagcaggagttaattgcagctaacccggaactgaaaaaaggcatgaaaaagggacaattcctttgcatcccttacccggcagcaacgaccgtgcaacctacacagaaggaagatccttacgctattcctcccagcaatagcgagcttttccgcaaaagtaaagagactccccaaaagctgtctaccattaaagcagccttattgttgcctttccaggaagacaaacgcatggtggaatactacgaaggtttcctgatggcagtagacagtctgaaacgtacaggtatttctcttgatctatatgtatatgattgtggaaaagatgtttctacattaaatacaattcttgccaagaacgagatgaaaagtatgaatatcatcttcggtccgatgcatcagaatcaaataaagccattgtccgacttcgcagagaagaacgacatacgcctggtgattcctttctctcaaaaaggagaagaggtattcaacaacccggctgtttatcagatcaatacgcctcaatcttacttatattcagaagtttacgagcacttcacccgtcaatttcccaatgcaaacgttatcttcatagaaccggcgagcgttgataaggagaaagcggaatttatcagcggcttgaaacaagagttgaaaagtaaaggaattccaatgagaaccgtcagtgaaagcgcaacgaaagaaacgttgaaagcagcgctccgcagtgataaagaaaacatctttattccgacatcaggcaacaacgtcttactaattaagatacttcctcaactgacgctgttagtcagagagaatcctgcagagaatattcatctgttcggctatccggaatggcagacctataccagagatcatctggaaaacttctttgaattggatgtatatttctattcttcattctatacgaatacgttgttcccggcagctgtgcagtttaccaatgcttaccataaatggtatagcaaagatttggcaagcaaataccctaattacgcaatgctgggttttgacaccggcttcttcttcctgaaaggattatcgctttatggctcggaactggaaaacaatctgcctaaaatgaacctgactcccatccagaccggattcaaattcgagcgtgtaaacaactggggaggatttattaataaaaaggtgttcttcatacgtttcactaagaattttgaattagtaaaacttgacttcgaataatacgaaaatgataaagataaaaccatttttgatcgcaacactcctacttacaggatttgcccttcctgctgtcgctcaaatcggagaagcacgaaacaatttatcggtaggtatcaatggaggtgtcaatttaaacagtgcttcttttactcccaccatcaagcaaaatagcctgatgggaattaccggaggtttgacagcacgttatatatccgagaagtattttgccatgatttgtggcgcacaggtcgagttgaatgtctcgcaacgaggctgggaccaattatttgaaacaatatcactggacgccaacggatatgaagtcacttcgaaggaccctactaaaacttacactcgcaaaatgacttatatagatattcctttcctcgctcaccttgctttcggacgagacagaggattgcaattctttgtccatgcaggtcctcaaatcagctttctaatcagtgaatcggaaacaataaaaggtattgatatgaatagcttatctgatacacagaaagccctgtacggagttaagattcaaaataagtttgactatggtattgctggtggcggtggtgtagaacttagaacaaagaaagctggtagcttcatcgttgaaggccgttattactttgccctgtctgatttctacagcactactaagaaagattatttcgcccgtgcagcgcatggaaccattaccataaagctcacatatttatttgatttgaagaaataacccctctttcaaggaggaagagattaaaacctcttatttataaacaaaatcccattcataacgaactaaaaaatccccactaactctaaacgaattagcggggatttctatttctggggactttagtcctttttatcgcaatctatccgcagcttttaccatcacctcatcccgtccgatagcacggatagccagtatattcaggatgatggaaacaagcggcaaacacaatgcccagcctatacggaacatattttcatcattcttcaatgcaaaataaaaagcaagggcagcaatgtaataacctactaataataagctattgaaaattgtcatgcgaatctgcaacatacggttcttatacaaaaagatagtagccacagccacgatagtgctaaccatcagaattccgaataagccccatgtagactgaatagcaccgtttacttccaatcctaatgccttaaaaggatgttctcccatcgcatcaatgaagtagcccatcggcaaacacatggctgtaatcagcaatcctacaacaatcaataaataaacagtttgaattcgttgaatcataagtattctaaatagtagttgagttaaacaataatagccaagcaataaggagcagggatcatcatcccacttactacttgactatcaaattcttcgtcagaaaataaattactgaagtttttctttctccttagccggatttctataatatattttcccttcgatgtattcttgcgtagcaatcaagtccggtttcggcaatttctcataataacgagaaatttcgatttgctctctattttcaaacacttcttccaaattgtcattgtaagaagcaaactctgccagtttcttagaaagatcgtttttgatttctacactgatctgattagcacgcttaccaataatggcaactgtttcataaacattacctgtatcagcacagagttccatcatatcacgggttactgttgtagcaggagcattcgtttttttgtagtccataaatctatttaaatttagtctttaattactttctgtgattcattgaatatcttctcggcttctttcaaatatttactttcaggaaattcattcttaaaagcgtaatattcatcaatcgtttcgcggtaacgatccatcttcttgtcttcaacgctatagatagccatttcgtgtcttgcacgcagaaccaaaatggaaagttcttcacgataatcagtataaggataatccttcaatgcattttgagctgtgattacacaagactcatagttattgcccaaataattacccagattataatataaccttgctgaataaagctctttcaataccagtttatcctgtaaagcaaaaatcatatcctgtgcttcctgcttctttgtgctgttcgggaaatactccatgaacatctgcaattgctggatagcctgataagtgcttgactgatccaaacgtggttccggagtatccaggaataaagccttacctgcatggaaacgtgccagttcagtaaaagtaccacgaggatatgtattgaaataggtgataaatgtctgggcagctgtctgataatctttctgattatagtagctcattcccaacatatacaaagattcttccgctttatcggttcctttcagaatggttatcaactcattcagcaacgtagctgaacgattatactgtcccttcgcaaaatagtttttggcggcttcgtacttgtattcgtaatcggtgcttttcagcaatttattgtactctccacatgatgtaagagtagccgccgcaagcaaagttataatgatatttttcttcatcctatttaaaaataatgcgcaaagttacttattcgctgggaatttagcaattaatctgtgttttttaatacataaaaggcgttaaacatcgacaaaaggagagaaaatgacgtcgaaatacaaatgacaaactataaactgcagattataaacgaatcacaatagtgacggtatgtgttcaggatagtgacggtatcgttggcatataccgtcactatcttcaccggatagcgtcactatatttatagtaaaaacggtaagcaattgcgctgtccttgaattggataacacaactgtttaccgttcattatttattgctcactgtatatttacagcttatacaagtcacttgcagccagtagatcgactttcttttctttcaacacctcgatacacttatccaggttgctggggcggatcactacatttgcaatatggttattggcaaacgaatacatatattcaataaatacgccctcttctgataaatatcccagcacttttgccaaagcacctggtatattgggacagcttatacctaccacatcagtcacattcactgcaaaatgattatcttttaaagctttgtatgctctatccggatcggatacaattccacgcaaaataccaaaatcagcattttcggcaatgcacaaggcagaaagattgatattttctttcgccagcacttcagtcacttccgtcaaacggcctgacttattttccaaaaaaatagaaagttgttttgctaccattatcgtaaagttttaagtattaaatctttctgttatcaatcacacgttttgctttacctacgctgcgttcaatgctgcgaggctctaccagtttcacgttgactcccagtccgagtacgctttgcaaacgtcctcccagtttcttcttcaaagccagcattttgttgatctcatccgaatagaattccggacgtacttcaacctggagttccattgtatcggtattgttttcacgacctactatcaacaaataatgcggttcaaactcttccatttcaagaatgactgattcaatctgcgtcgggaatacattcacaccgcggataatcaacatatcatcactacgtcccaaaatacgatccatacgtaccaatgtacggccacaggaacatttatcatgatgcaaggccgtcaaatcacgcgtacggtaacgaagtaacggcataccctctttggttaaatgagtaaataccagttctcccgtttgaccggattccaccggttgcaatgtattcgggtcgatgatttccgggaagtaatggtcttcattcaagtgagtcccgtgctgacattcgcactcgtacccgacacccggtccggcaatctcactcaagccataaatatcgtatgctttgattcccaacttttcttctatctcatgacgcatattttccgtccagggttctgcaccgaaagcaccgactttcagtcggaattcttcacgcggtaaaccggaatctttgattgcatctgccagataaagcgcataggaaggagtacaacacagcacggtcgatccgaaatcgtgcatcaaggttatctgtttttccgtgttaccactggacatcggaataacagaagcaccgatattttcggctcctgcatgtgctcccaatccgcccgtgaacagtccgtatccataagatacctgaaaaatatcagaacgccccgctccataagcggtaaaagcacgtgatatacattccgcccatgtagacaagtccttacgggtatatccgacaaccgtcggttttccggttgttccggaagaagcatgaatacgtacaatttggctcatcggcacggcacaaagtccgaacggataattatctcttaaatcatgtttcgtggtaaacggcagttttacaatatcatcaatactattgatgtcatcgggagtaatccccatttcctgcatcttctttcgatagaaaggcgtgttgtgataaacgtaatctacaattttcttgagtcgtatgctttgaatcttgcgaagactttcgcggtccatacactcaatgctctcattccaaatcatgtgtttctggtattactagttgtatgaatctgttttttgatattaatatgttgcaaagtaaaggatttatttggaaaaatgatttgttatctcgattattttaccgaatattgctccactttttaggatttaactatgaattatgaactaacatcagcttataaacctaccggagatcagccggaagctatagcacaacttactgaaggggtccttcagggagttcccgcacagactttattgggagtgaccgggtcgggaaaaacatttaccattgccaatgtgatcgccaatatcaataaacctacgttgattttgagccataacaaaacactggctgcccagctctacagtgagtttaaaggttttttcccaaacaatgcggtagaatattacgtttcttactatgattattaccagccggaagcttatctgccgaacagtgatacatatatagagaaagatctcgccatcaatgacgaaatcgacaagctccggctctctgccacttccgccctactctccgggcgaaaagacgtggtagtggtttcttccgtatcttgtatctacggtatgggaaatccttcggacttctacaaaaatgtcatcgaaatagaacggggacggatgatggaccgcaatgtgtttctacgtcgtttggtagacagtttgtatgttcgcaatgatatcgacttgaaccgtggcaatttccgggtcaagggcgacacggtggatatttatctggcttataccgacaacctgctccgcgtcaccttctggggggatgaaattgacggcatcgaagaggtagaccctatcacaggagtcactatcgcaccatttgacgcctataagatttatccggccaacctgttcatgactaccaaagaggctactctccgtgctattcatgaaatagaggatgatttgaccaagcaagtagctttcttcgaatctatcggcaaggaatacgaggccaaacgattgtatgagcgagtaacttacgatatggaaatgattcgggaattgggacattgttccggaattgagaattattcccgttatttcgacggccgtgctgccggtacccgcccctattgtttgctcgatttctttccggatgatttcctgatcgttatcgacgaaagccacgtaagtgtaccccaaatccgtgcaatgtacggaggagaccgtgcgcgaaaaatcaatcttgtggaatatggtttccgattgcctgccgctatggacaatcgcccgttgaaatttgaagagtttcaggagatggcaaaacaagtaatctacgtcagtgctacaccggcggattatgaattgattcagtcggaaggaatcgtcgtggaacaggtgattcgtcctaccggtctgcttgatcctatcatcgaagtacgtccgagtctcaatcagattgacgatttaatggaagaaatccagctccgtattgaaaaggaagaacgcgtactcgtcactacactaaccaaacgaatggcagaagaactggcagaatatcttcttaataataatgtgagatgtacctatatccatagtgatgtcgacacactggaacgtgtgaagattatggatgatctccggcaaggagtttatgacgtacttatcggggtcaacctgcttcgtgagggtctcgaccttccggaagtgtctctcgtcgctattctcgatgcagacaaagaaggattcctccgctcccaccgttcgttgacacaaactgcgggacgtgccgcgcgtaatgtgaacggtaaggtaatcatgtatgctgataagatgacggatagtatgaaactgacgattgatgaaacgaaccgtcgccgcgaaaagcagttggcatacaatgaggcaaacggaattaccccgcaacagattaaaaaggccagaaacttgtctgtattcggtaatgcaaaagaggcagatgagctgttgaaagaaagacatgcttatgtagaaccttctactccgaatatcgcagcagatccgatagtgcagtatatgagtaaagcgcagatggaaaagagtatcgagcgtacccgcaaactgatgcaggaagcagccaagaaacttgaatttatcgaagccgcacaatatcgtgacgaattattgaaactggaggacttgatgaaagagaaatggggataaaatttcccctttgttcacttattatagcctgattgctaagggctgaaactcttaacaaacctgtaacttcgcatttagtctattaattagtgttataaaaacaccaattaagggctgataatttgcaaagttaccggaatcccgtatctttgcactgtgtttttcatagtattagatttaaggttaacaaaggttggagcaaggcgttgctcctttttttatgtctatacgtcaccttcaatgaaaaatataaaattgaaaagacataatgtaccactctctaaagcataaattaaggaggattgcagatatagactgatcgttcattacgactgaatctattcatgcaatcctcccatttcttatagttggattattcctacttcaagcgatgataaatcaaagagccttctctatggcatttttaatcaacggttccataatatcatatccctcgctcgttggatgaactccatctttagtatattgaggattcaaggcctgattttcgtcaaccaccattgccttgtaataattaacaaacggaattttatttgcttttgcataagcctctatccggtcatttaaagatttaattttctgcggaacatcttttatttccattctccacttaaatgcagcagcaggcaatacggaagtcaaaattacttttattttatttgcttttgccagttccgccatagaaacgatgtttccgaatgtataatcttcattatacgcttgtgtattttcagcgacatcatttgttccggcattaatcaccactaaagcaggagaaagattaatcacatcttcccggaaccgtaacaagaattgataggaagtctgcccactgattccacggccaatgtaaccatttgatttgaaaaaatccggatgagtccttacccatccttccgtaatggaatttcccataaaaataacccgtttgtctttctttgtcgcttgtggaagtgcagcattttcttttgaataacgacgtagattagcaaaatcatttttctgcgcatagctttctcctatcgagaaactcaagcaaacaacagccaataatatccattggccccatcttcttttatccatgtttatattaagtattagtaatattatatttcatgcaaagataaaaagaaaagcgatgcaccatactttgtacggctattttttgtgcatttccatgccataatgtgctgataaatgtcagacgcgagagattttttctgcatatttgttattgttttcaggtttccagcaaaaatacgccatacgctgggagcttctaaattcatcggttcttttcaattggtttcggttctaaatagtcatatacgttcgcatattaataacctttctttggggaagcaaaagttagaggcttcatttgcctgaaacgaagcctctgaatgtatcaaacagaggctctgccgcatgggtttagagcctccatttagggaataaaaagcgcctttttgccgaacgcatagtggaacactctccaaaggcagataactcactatatgacaactggttacgccttcctaaaaagcccccttgaacacttaccggtattattataaatatataaataataaactatatatattaaaatgtatagttcgatttttctatttttgaatctttataacgcaaatcgcatgtgctaaaatttatttgtagctttgcttttttcgaataaattcagctgttaaatcagttcatagtaattattaaaaaagttgatgaagaaagaaaaatggaagcatacgcatttatctgtcgtccaaaatatcgaataaccgttaaggcgaaggtactttttcttaatctatgttatataacatgcgttttttcttggattatttgctaatttcacaacagtccgtatctttgcattgtgtttttcatagtattagatttaaggttaacaaaggttggagcaaggcgttgctcctttttttatgtctatatgcttgatttcctaaaaaagaatggtatttttgtaaagtcacaattattatccgaaacatgaaacgcaaactactttataccactctaataatagctattctgtgtgtaatcagcatacttgtatgtaacaggacgatcaagaaacacacagtctccaaactatatacggaagtaaatactatcccctccaacaatgtaggattacttctcggaacttctcccaagttgaaaaatggaaataacaatttatatttcgattatcgaattcttgcaacagtagagttatataaagccgggaaaattaaatatatcctcatcagcggcgataaccgtaaagaggattacaatgaaccggaagaaatgaagaaagcactcatacaaaaaggtattcctgaaaaattcatttatttagattatgccggattccggactctcgactctgttgtacgtgccaaagaagtgtttggacagaatcgtctgaccatcatctcacaacgtttccataatgaacgagcgatctatcttgcagagaaaaatggaatagacgccatcgggtacaacgcacaaaatgtaaatgcttatgccggactgaaaactaacatccgggaattactcgcaagagtcaaaatgtttatagatttaggtatggataaacaacctcatttcttgggggagaaaatcattattggaaacaataaatgactaaatacaaaatgccatgaataaacacaaaagataaaacctatgagacatcaacaaaataagaaaaaaacagcctggaagaaaagtcgcacctttggtgacattaaaggaggaagaatgcgaatcaaattaaaggataatatagtgaaaagagaacactctttattaaaaccaactgaatttgataaatgccccatttatataatggaaaatccgtccagggatttctattttccaataacaatagaccatattgaaagtgtattgaatcaattacccgaaaaagatgtatcatgtataacacacatatggctacgcaagcctaattctaaagtaaattgccaaagttattttactacgggtagtggagtatatgccatcatactgtatccatttcccaaaaacaacaaaatatccataggaaagagcaaacccagtcacaaactactaacatggtataaaggctatgcatctgaacctgtaaaagaacgagataactggtatattgaattcacagaagaaaatgcaagaagatattatcttgaacgtttattaatgcatgaaatcggacattgtgtcaatgtatggttagtttataataaagcagcaaactacaaatcagaaaatagtgcagataattatgctttgaataataaacttgaaataacttattaaattatggaacaacaaattcaactcaacgatcacaataagcaggaataccctcctatgcatacagcagagcatttactcaatgcaaccatggtgaaaacctttggctgcccacgttctcgcaatgcccacatcgaaagaaaaaaaagcaaatgtgactatatactttcgtcatgtccgacagcggaacaaatccagtctattgaagatagagtgaacgaggtaatcagtcagaacctacctgtgactgttgagtttatgactcatgaacaggccaaagatattgtagatttaagtaagctacctgccgatgcaagcgaaactcttcgcattgtccgcattggagattatgatgcctgcgcctgcatcggattgcatgtatcccatacttctgaagtgggtaccttcaaaatcattagttatgattatgacgaagaaaggcaaacactaagaataaggttcaaactgatcgagaagaagtaaacaggttatcaaattaatatctatcttatataaaataaataaaaacaggatacattttgtcatttatattgcaaaaatgacattataaaaatgacaaatagacaattttagtctctaaaatctcttggcataaggtttgcatttatagaaacgaacaacggttcgagagcggacgatggaaggcgggataaccgataccatcggaagtgaaaatgccgaagttctaaatttattaattgaatgtttaacttaaagataggagactaaaattatgatgcctgttagaagaactcaaagttggttaccaagtatctttaatgatttctttgataacgattggatggtaaaagcaaatgctactgcacctgcaattaatgttttggaaacagaaaaagagtacaaagtggaattggctgctcctggtatgacgaaggatgatttcaatgttcgcattgatgaagacaacaacctcgttatcagcatggagaagaagactgaaaacaaggaggaaaagaaagacggtcgctatctgcgtcgcgaattctcatactctaagttccagcaaacaatgattctaccggacaatgtggacaaagaaaaaattgctgcatccgtagaacatggtgttttaaacatcgaacttccgaaactctctgaagaagaagtgaagaagcccaatcggcaaatcgaaataaagtaatacggtaaccacttgctgttcaccggaaacggtgataagaagtaataaaacagctctttccctgaaaaggaaacgagctgtttttatattattatccttagttattcttccgataactaatcactgcccaactattaaacactactgcaaaaaacaacaatactccaaactgtggcagtaaatcaaagaaaccactcccctttaaatacaccattcgcatcacttccataaaatacctcaaaggattgagcctggttattatttgagcccattccggcatactgctaatgggagtaaacaaaccactcatcaaaattacaaccaacaaacagaaccacataacaaacatagactgttgcatcgttgccgagtagttggaaataacaagtccgaaaccggacattaccagaacgaaaagaactgcgaaaaagtaaatcaatagaaaatgaccgaccggcactatgccataaattaaccaagctaatatgaaacatacagtcagcaccacaaaaccaatcaaccagtaaggcaggagctttgccaaaataaagataaacttcggaaccggcgtcacattgatttgctcaatcgttcctacttccttctcgctaactatattcaatgcaggcaagaaaccacaaatcaaagttaataacatgaccatcaatgccggaatcatatagagtttatagttcagattcggattaaacaacccctgtgtatcaatgcctatcgaagggaaagcaccggagactgtagcagttgcaggatattccgaacgcagctcggctgcataatcattaataatagaagatagataagaactccccagccctccttttgtcccattcacagcattggctgctatcagtatgtgggtatcttctccattcatccaatcccgttccagatgccgcggaatttccatcacaatatccgccgttccaatttcaatattccgtaggccttcttcatacgaaaccggcacttccaccagacggaaataggtagaggcggcaatcttattgactaaacgttgtgaaatagccgaatggtcattatccacaatattcagctgtatattcttgatttccagatttaccgcccaaggcatcaacagcataatcatgcatggaaatacaagaatcaatttcggaagaaacgaattgcgaagcaattgtttaaactctttttctatcaggaactttatcataaataattcttccatttatcaatctgcccattagcacactgtatagtattcatacaaccaattggcatatcgacatattattccaatctatacttaaatttcttgatactgatcgtaataagtaccgtcgccatcaataacaagataccaatctctttatacaccaatgcaactggtactccttcaatcatcagtttacgcacagcctgtatataccaacgtgccggaagtatatccgagatccattgaagtatcaccggcatactctctatagggaaaatcatgcccgataaaagcattgtgggcatcatcagcatcaatccggaaaccagcatggccgcaacctgtgtacgtgtgactgatgaaatcaataagcccaatgccaaggatacgaagataaacagcaaagatacggtgattaaccagaacaaacttcctaccaccggaacatccaacacaaagaccgaaagcaaaaggatcgttatcagattgacaaacgacagcacaaaataaggtacagcctttgccaaaataataaatagcggcttcacaggtgaaaccaataatacttccatcgtgcctgtttctttctcacgaacaatggaaatcgaggtcatcatggcgcaaatcagcatcaggatcaagcccatcactcccggaacaaagttataagcactcttcatctgcgggttgtagagcaatttgatatcaggagtcaggcgggcagccgacatattcgggggaatcatctcctggcctaccatagaaacgattcctgtcgcataattaacttgcgaagtcgacatattgggatctgttgcatctactatcagctgtacacgagcatcacccgtatagagatcatccgcaaaccgttcgctaaagacaatcgccatatcaacttcattctttaggaaagcagcttccatttcctggggcgaatgaaaacgtgcagtaacggtgaaatactcactggcatccaaacaatcaattatttttcgcgttaccacatcattagaaggatcgagtaccgccaaccgaacattcttcacttccgtgctgatagcaaaaccgaatagaataatttgcacgacaggcatccccaacaaaatcagcatggttcgccggtcacggaaaatatgataaaactctttctttataaaagctataaactgtctcataatcaatctgctttgcgcaccgcaccgcgggctaatttctgaaaaacgtcatccatcgtttccgcaccgaattgttgtttcagacgggcaggtgtatcaagtgctttaatctgaccgtccaccatgatagatatccggttgcaatattccgcttcatccatataatgggtagtgacaaacacggtaataccctgatcagctgcctgatagatcaattcccagaactgtcttctcgtagcaggatctactccaccggtcggctcatccagaaaaacgattctcggttcatggaatattgatactgaaaaagccaatttctgtttccatcccaccggaaggctcttcaccagagtatcccgttcggcagtaagctccaaacgatccaacaattcttctgtcttccgttctatctcttgttccttcatgccataaattccggcaaacagacggatattctcccacactttcaggtcttcatatagcgaaaacttttggctcatatatccgatatgtttcttaacttgttcggcctcccggtaaatatcatatcctgccacctttccgatgcctgatgtcggtttacttaatccgcaaagcatacgcatagctgtcgtctttcctgctccattagcacccagaaagccaaatatctcgcctcgattcacctgaaaggagatatgatctactgcagtaaaatctccaaaacattttgtcaactgttccacttcaatgaccggagctacttcatgcttcacttcctcccgctccaaagaaggagggcaaaggatagacgcaaattgatgaagaatacgttccggggtatcaatgccatgaatctgtccatgattgatgaaagcaatccggtcacattgccgggcctcatccatgataggagtagaaacgacaatggtaataccctgttcccgtaagtttcggagcatttgccagaattccttacgcgacacgggatctactccggtagtaggttcatccaggaataaaatatccggtttatgaatcaaagcacagctcaatgccagtttctgcttcataccacctgacaaagcccctgcccttcttttcctgaacggttctatctgttgatagatatctttaattaaatcataattctcctgaactgtcgtatggaacacggtagcaaaaaactccagattctcttctaccgaaagatcctggtaaagtgaaaaacgaccgggcatatatcccaccttcgtacgaatctgtttataatccgttaccacatccagcccggcaactatggccgttcctttatccgccagcaacaaagtagtcagaatacggaataaggaactcttaccggcaccatcaggccctatcagcccaaagatttctccccgttccacaacgaaagaaacgtctttcagcgcctccactgttccatagttcttgccgacttctttcacaaccactatgggttcttcctttgccattcccttgcgtttaatttttaatcttcaatttttaatttttcaatgtcactcctccgtacatgccaatcttcaatgctccgtcattcttcacggcaattttcactgcatataccagattagcacgttcgtttttcgtcaaaatcgttttgggagtgaactccgaacggtcggaaatccaggtcactacccccggataagctttctgctccgagtttccataatcagcatacacagttacctcatctcccagtttcacttgcgacaactgttcggaggtgatgtaagccctcaaatacatgcgatccacttcagccactttaaacagcggtttacctattgccgccaattcaccggcttctgcatattttgccaatacggtaccttcaataggcgactggacatgacatttagctaattgatcctccatctgtgcaacttgtatggcaaccgaatttccttgttctatcaggctgttcgtactattctgcaatgacgattcctgtgcgacaagctgcctttcaagcaatttgacttgtgcgtcccagtcgtccaactgtttctgattcgccgctccagcggcaagcaggttttccacgcgtttcttttcacgttctgctgttgctatttgctgtttggtagcagctatctgtttagcaagatccggacgttggctttccactgatttcatactggcctccagttgtaatttcttcaaatacaattgcaccgtatccaccagcccaatctcctcacctgctttcagtcttgttccctcttctacctccagtcgcaacagctttccggcagcttcggcagagactatcacttccgtggcttcaaacgtgccggttgcatcatagccgggtattcccttaccacaagcagccaacataatcaatgccactccatacattcctatctttgtcattcgttccatatctaaagaagttatattaatcattcgtagtatatttcaattgataaattcccattaaccgttgaatttcatgcaacgctttcgactgacgtgccaaactctcattggtcaattcccgaagcatctcggtcaccgtcaatgttccattcgccactttggcctctgccgatttgcgaatattggtacgcaaacggataatctcatcatcatcctgcatttgcttttccaatgattggatggcctgatcttgttgtgtcatctccaatcttgtattaaacagaaacacatcccggttattatccaattgccggcgtttattttcaattaccttccggtcattcttcaaggtatacaaactaccaaaattccatgaaaggcgaacacccgcaatatagtagggagaaaattcatttttcagcatattcaatccggggtttccataagctccctgcacgaataatccgaactgtggaagatgacgcacattcaaagctttctcctgtacttgcaatcctactccttgcgcattgaacaaagataattccggacgacgaatctcaccgacagccgaaatgtcatcttgaggaacaggtttctccaaaaccgtttcctgcgacaatttctctcctaccaaaagtgaaagcatcttcaaatacgccatacgcgatgaagccagttcaactcttttctgctttgtgttcaactgctccactttcacagcatccaaatcggcctgattggcaatgccattttctacgtaagcagtaatctggcgataatttctctccagttcatcttgcaacaatgcattctgtttcagttgctcgtccaacaaaagaatcccaaaataaaggtcatttacacgactatttagcgcatacatatccacattcagtttttctttctctatctccgcttccgcagtcgtttgtttcttctgcatccggattcctccaccatcccagattttctgttgtaactccaacatcacctgatactgatctttcggcactcctttcaaatccactccgggaagcttcaccggaatttccgttacctcactctgataagaagctttagccgaaagggcaaactgtggcaaatatccttttgccgcattctcaagattatattcctttgttttctccaccaagccatactgatgtaccaacggataattttcttgcgtcttccgttgacattcttccaacgttatctgcgcatttattcccgatacaaacaataaaaaggagaaactgaaaaccattcttttcatacacatcatttctttaatttcttcaaaagacaaagatagaggtttcaaagatacgttcacattccgatagttagtaaaaatgttccaatagttcgataaagagaaagaataaaaggctatttgctgatttttattatctttggcggaaaaaacagataaagatggaaaagaaaataccattaaatataggtctcgaaatcttagaaaatccggatatcgtccgatttaacgaatttcgtttcatatctccgcatttcggattcgtaaacagcttcgccaaaatagaatccaatcttatcacaatagatcaaccttatcgtatcaaagagggacgtatcgcagttatcaaacagggatatgcacgcgtattaatcaacctgatagaagaaacttttcagccggacaagctactattaattgttccgaattccattcttcagattatagaagtctctccggattttgatatgcagatggtagccatggacgcggaatttctttctatagccggaaaagacaatttcttcactcatctctcacagttacagaaaaacctcatattatctctgacctcacatgaatacgacttgtttaagagttattttgctttaatatggaatatattacaagaaccgacgttccgacgggaagctattcaatatctactaatcagtcttttgtgcaatatagaatatcttgtcaaaaacaacaatcaaaaagaacagagctgtcagacacatcaggaagagattttccagcgtttcatttctttagtcaatgcttatagcaagaaagaacgtaatgttagtttttatgcggataagctatgtctcactcctcgttatcttaatacgatcatccgccaaaccagtcaacaaacagtaatggactggataaaccagtccattatattagaagctaaagtattgctaaaacatagcaatctgcttgtttatcaaatttctgatgaattgaacttccctaatccttcttttttctcgaagttctttaagcgaatgacaggaatgacaccacatgagtatcaattctcgaaataaattttatttcgagaattccttaattctttgctcttcttccagcttgcagatcaataatgtgttatctttctctgcaatgatatatccatccaagccttgaatgactactcgtttttcttcgctggcatgcacaatacaatttttactttcgtacaaacggatatcggttcctacggttgcatttccagacttatcctgtggaagcaaaccgcgaagtgctccccatgtacccagatctgaccaaccaaaagaagcgggaagtacataaatctcctgtgctttctccatcactgcatagtcgatagaaatgctttcgcaagtagggaataacttcttgattgtttcattctctttctctgtatagaaatcggggaaaatgcgatcgaaaatttgtgcgatgcccggagcatatacacgcatcacggaagtaatagtacgcacattccatacaaagattcccgcattccagaaggaattgccttctgccagatacttttcggcagtctctttatccggtttttccttaaatgcatctactgtataaatctctttatctgtctggagctgatcggcagcagcaatatatccgtatccggtttccggacgagttggccggatacctatcgttacaatagcgctgccatcatctgtgaaacgaagggctttctccatcactctacggaattctcccgtatcaatgactaatgcatccgaaggagttactacaatgttagcattcggatgttttttcttgatcttccagcaagcaaaagcaatgcagggcgcagtattgcgcgcacaaggctccgccaaaatattactttccggaatttccggcaactgctcccgaacaatatcaatgtatttttcagaagttacgacccacatattttccctagggcaaacaccgtcgaaacggtctgccgtcaactgaatcagcgaccggccacatcccattacatcaataaattgtttaggacattccggagtgctcatcggccaaaagcggctccctatgccaccagccattattacaacatgattatccatacctgttattctcctgttaaaaaaatattctttaaaataggtgtgcaaggtacttcaaaatgtccaaaacagcaaataaaaataagagtatttgtaagctcccgataaagtaccaatatttataatgaagaagtattcaatataaaaacggaagacaacaaaagtgctgtctcccgttttgagttgtatattatctagtgataatatcatttcaaatatcaacgatcttcacagacagttgatataatagaaatcacatcggatttacaccgacatgagggcattgatcaggaatacaccgccgtacatttcctgaccacaaaatgtagggtgcttcatatgtgtagcatgaagttagggacctacatgttccatctcacttttgtgtaaagtattaaaagtactctatgacattattaacttaaaaaaatctcgatcaccaataaaatatatattggcgaattctatgtcaaagtttattaaccgctatattttggttgaatttatgactccttgtcatgaaaatgttctccatatccataaccgtaaccatagcgcttaccataaccatagaacttgccatatttaccataaccgtaataataaccgtattttcttcttttcagatccaaaccattgattacagtacacaggctaggcaatttatcttttttagcaagttcgttgatcaaagtatactcgtttttatgagtatagtctgcacggcagacataaacagacaggtcagccacacgtcctatcaacaaggtatcagttaccataccaacaggagctgtatccagaatcacataatcaaaattcttcttaagagtttcaatcgctttatccagtccatcacgagccaataattcggtaggattaggaggaactgttccaccgggaagaatataaagattcttacttacatcagaaagctgtactaaatccatcaagttcttttccggattagccaaatattgagttataccaacttcttttctcggaatattaaatactttattcaagcccggtttacgaatatcaagaccaacgattactactttcttccctaataaagaaagactaatagcaagattagcagaaatgaaagatttaccctcaccactaaccgtagaagtaaccagaatcaccttcttgtcattttcaagcataaactgaagattcgttcggatattgcggaaagtttcactcatcaagttattgtgattctcaaatacagcaatagtaccctgcttttcatcagtcaatggaatatcaccaacaataggcacacaagtaagcttttctacatcagaacgaccttcaatcttgaatttggttaattcgagcaggtaaataatccccaccggaattccgattcctaacactaaagcaaccagataaattatcttgcctctaggagatacaggagtatcatccgctatagcgtcatctataatcttcgcattattggctgtagcagccagagttatcgcattctcttcacgcttctgaagaagcatcaaataaagtccggcctttatctcctgttggcgagcaatactcacaaactcacgctcctgaccaggtgcctcactaatacgacgggaataacgattcgcttcacgatccaaatctgcctttgtaatcaacaatccacgcaaaaccctgtctaaagatacttgtacattctctttcatggcatgaatacttgtatccaagtttataatggtaggattattctccgttgatgtacgcagcaaacgttttctctcaacaagcacatcattataacggttgatggcagccgcaagattcacatcctgcaatccgatattactaggtaaaacctcataaccttcattttgcatatatttttgcaaatcctgcagcaaattaatctgggtttgattctccacacgcttcttttcatattcagcactacccgtcaaagctatttgtgcatcactggtcaaatccgtaatacccgccccacgtttgaaactttccagatccttttccgtactacccagttctttagaaataatactaatacgttcattgataaattctgctgttttctgtgccacttcattcttatcattattcgtattgatattatacatctccaataacttattgataaaatccttgccgcgttgtacatttgagtttttcaatgatatgacagccacagaagtggtcttggaagtaggctcaatagtcatatttttgcaataccctttcgctacagccaaaggcttattaattgttgctgtaatattacgtgtagtcttttctgaatctgtatttttttccaatatttttttagataatacagaatccggtgtcaggaaaaaagccaatgttcctttatcggtaggaaaaacagccggtaacttttcgaaatgtttctgatattcatcatcgccaagcttcacattcacatccagacttccttgtggttgcaatatcatctccacaattatcggtttctccaataaatcggcctcctgcggagtcatgctcacttgtacaggtgaagttttatacatattcctggaaagaaattcatcctcatccgtataagaaatatagaggcccaaatcttcaaccacttctttgacgatagtcttggaacggagcacttcaatctcgttatcaatattctgtgaagaagacatcaaaccatccaatcccaaactctctagcccagaaagcattccggcactacctccctttttatcgtcctttattaaaaccgtagcagatatgttatacacaggagtagctatatacaaatagacccatgctgtaatcaaacataccacaaccgcccccacaaaccaaggccaatggagcaaatacttaaacagcagttccttgacatctatactttcttccttaggctcttgtgttccgttgaattctgtttctttcattgcaaatcgttattttaagatgtttactaataggctgacaacggataccaagatagaggtagcggagaaccagaggctggtactattgcccacatcagaatttcgagcctttgctttattgggagttatataaacaatatcattctgttgtaaccaatagtaaggtgaaagaatcgtttcggcattatttaaatccaaagtgacaatttgctgtttgccatttgcgtcctcacgaatcagcttcacattatcacgaagaccgtataccgtcatatcaccagccatggccaatgcctccaatagattcaccttctcattagaaatagtaaatgtacccggtcgagcaacctctccaatgactgatatcttataatttaccatacgtactgtaacaataggattttctttcatataaggcttcaatttatcaacgattaactgctctgcctgtttctttgtaagccctccaactgtcagtgctcctaatactggaaaagatattttcccttcattgtcaaccaaatattgttgtaacacaggctgagtagtagtgtactgtattgataaattagacgggctggcaattgtcaagttaaagggtgcagctagttccggactggtacacgaaaccacaattgtcaataaatctttcggcatgatctttgcatcataaagagtttcctgctgagtagcttgattgactgcttccacgtcttgcaaataaggtacctttttataagattgacatgctgctaataaaaaagacaacaatatcacacatattagtttatttactttttccatattcttatcatcttattcacttttaaaagtaatatcatctgtaggggggtatataaattcaaactctaaagttcttgccagcccctctcctaaagaataaggagctttaaaaacagaagaatgtattttagcagcatcaaattcagttgttgcacaaaacttcttcacacgcacagaacttactgccaatttcttacgagtaatgcaagcaaatatatcaaaacaatatcctcctatcatgcccaaccaataagggaaatgagtagccggaatatgtttattcataactttgctcacatgagccactagttcattcattgtaaaatccggcttgtcaacataattaaacacattataacctgtccgaacctcatcaatcatgtattttacaaaagcaacaacattaccgacataagccattgactttttattgtttccagaaccaatcattagaaactttccactcgcaatttgctttaataaattgtacacattgcctctgttacgttctccaaaaatgactgttggacgaataatatcaatattccaatccggatgtaacttataccattcatgcaaaatttgctctgcctgccatttacttttcccatagtgattaaacggatctgccggatattcttcatttggattctttttatttagaccatatactgcaacagatgaaaaaaaaatgattcgttttatattatttttctccattgcttttaatgtcttttctataccacctacatttgtatcataataaagagataccggaacaacatcatcccgatgctgtgctgctaataaaacaacacattcagccccttccaatttcttatctaaataatcctgatcacgtacatcaccaattgctgtaacttctggaaagaaacgactttgttgcaaatcaatattcaacatctcatatctttgtgcttttttcaaaagtgtaatcaaacgagtcccgacaaaacctgacgcaccaattaaagttattttcatgttttttactaattatctttttactaacaatttacaaattacagacatctttaaatttcacgcatagtttcgcataatcatatttttcggctgcttttttcgctttattacatattgtctgatactcatcagaaggcaagtttttaagcgaaagtatagcagcggcataatcctgcggatcagttaacttacagtctatgccgacaccctcctctaatatgatactgtatggcattcccacattacaacataatggtttaccacttgccagtcccaaaaacatcttattcatactgccaccatacttcccgaaattagtagaataattcagagcattcacatctgcttttgaaagtatatatggcacatactcaggtgatgtccattttgctttaaattttacgtttgtaatctgttgttcttcacaataatgctctaaaaaagccctatcctcaccatcaccataaatcaagacctgcacactattattctgcaatattttagctgaatctataagcagtttaagattatttgccaatcgaatgcttcccaaataaataatattgaaagttttatcgtttgccaaatcaaaatcttctattttgtatctttgcatgttaacattaaactcagacaaatcaataccattatttatataatgcaatttatttaaatcaattgtccccccctgatcactatcccatccgttttctctcacataattaactgcaccaggcatagaaaaaacaacgttgtctgctttactataaatatatcgttctaaacaataagcaattttcacgcatggattattttttcccaataagcctaagcttacgaatgaatcaggccataaatctgtaacatccacaatatattttgcttttacctttttagcaagttgataaattggaatatcaaaaggaatacgagatgtatgaattatcacatccggtttctcaaattgttttctatggatgaataatttaaccgcaaacctaaaatatgatataatccttcttatcccattagtagatccacaacctgcatttactaaaacaaaagggatattatcataagttttctcttcaaatgtcttattagagtcagacaaacataagtttctattgtgaacataactagaacaaaacaatttcacattatagccttctgattgaaaatattgtgccaactttattgttctcaaatgagtgccataaaattcaataggtgctgcatctttatttatgaaccaaatagtctttttcttcatcataagattattacttccaagcattcaacacttttacaaccctttcaacctcttccatagatataacaggactcattggaatactcaattcttcagcatgaatcaattctgtaattggaaagctaagatcattccattctttatagcattcttgtttatgaggaggaataggataatggatattagtttgaatatcattctctgctaaatattgttgcaagccatcacgatctgcacaacgaattgtaaaaagatgaaatacatgtgcattccaatctttcacaattggcaaaataatcgctggattctcaatgttttctatataatattttgcaacttcttttcttaattgtatatcattatcaagataacggagtttaacatcaagaatagctgcctgaatttcgtcaagacgactattacgccctacatattggaaaacatatttctttgcagatccgtaattagcaaccgaccttactatatgtgccaactcatcatcattcgttgtcacagctcctgcatcccctaatgcacctaagtttttacccggataaaagctatgccctgcagcatcgcctatcgagcctgtcattctcccattaaatttgcagccatgtgcctgcgcattatcttctacaagcttaagattatatttttcacataattctcctattttctcagtatacgcacactgaccatagagatgtactataagtatagctcttgtacgagaagttatagctttttcaatcttagaatcatcaatttgatatgtttccagattgggttcaaccaacacaggaatgagtccgttctcagtaatggctaaaatagaagcaatataggtatttgcaggaacgataacttcatctccaggtttcattatccccatttcaatataagcacggaaaatccaaatcaatgcatcaaggccgttagcacatcctatagtatatttagtaccaatatatgaagaataatgtgtttcaaacattgcattttctttgccttgtaaataccaccctgaatcaacgactctcaatactgcttcatgaatctcttctgcatattttgcagtaactttctgtaaatctaaaaatttaatcatatccgttttatattttatgtttaactccatttttatcacacatatttaagtccagagcaataccatctttagtgatatacccttttttacatgcaggattaccaaaccaaatctcatgtgccggaacattttttgtaacaacacttcctgccccgacaagagcgtactcaccaataatcaatcctcccattattgtagaattggctccgatcgaacaatgttcctcaagtgtcgtcattaaaaattcacttggatagacttttgaacgaggaatcaaatcattaataaaagagacatttgctccgataaaaacattatcttttactcttagaccatcccacaattgtactcctgattttacagtaacattgttacctataataacatcattctctacaaaaacatgggcacataaattgcagttacttccaataacagcaccatttaagatgacacaaaattgccatatagtagtcccgtcaccaattaatttactttgacagtcagccagtgggtgtatcatatattcctcgctttatatatttgttaatacttcaatgtatagtttagcctgactttcccagttatactcttctaaaactgctcgccgaccattttgccccatctgataagccatttccttattttcaactaaatattgaatagcctcctttatttgctgcgaattatgtggatcaacacaaattccacaattatatttttctacaatttcacgatagcatttcacatccgaaagcaacaccggtaaccccgcctccatactttcaaatattttcaacacaccaaaagatccattcggactgcctgtccgactaaaatcccgaagagtattactaatagtcatttttgaaaaaactgttgatatctcttctttcttaaacggccctgcaaaatccacattcttccagtttggaaaagtttcaagaacatcaacatatccttcttcaatcacacctgcaacataatatttgatatccggcaattccgctaaagcttttaatacttctttttgacaactaatccaatagactgttccaatatatccaagaacatttttacgggataaatattcctccttggataaagtaaacctggaagatacaacagggaaatttttaataacataatgattctttattccccacttttcaaggcgattgtcagtatcatcagttacagtaaatacagcattatatttctttagagatgacttcagatatttctccatcagcactgcaattacattacgagccattttaggcaaatatgctttatcatgaatgatgccaggataaaactcacgaagattaaatacaactttatatcccttatgtttcaatttaaccccaagagataatagctccggatcagaaatttggtatacatctgcatttatcatcagtgctttcctataaagaaatttcttggtattcagcatcctctctatacgcgagcatggcttatagttacacgaaataaactcaataccatcaattgtttcattcggttctaagtcacaaacaacaatagtaactttatagccagccattgccaatgccttcccctgacggtcaaagatcaatgggtcttttcgagaataaagccctgtgagataacaaatatgcatcatggatttaattttatattttcacgtttgtcgtgcattactatatacatagaaaatagaaagatataattaacagaaaataacccaggacgctgatataatgtagcaagtagcaaggttataaatataagaatataccatatggactttatacgatttaaggcataaagaacaaagaaaagcaggtacataatacagacaacagctccattggacagaattgcatttcgataaccagcactatccgagaagtttgccaactgtctcttattatctaccccccaccaatattgacttgtaccctgaatagaattaaaataactttttaaactactatcagccctattatccccactgatcatcccttgtgttttatcatattccaatctatcccaaatcaacaacctagtcattgtattttgcatagaaaaaacaattaacaatgccattaaagaagagatgaagaatttatatacgaccttgacatttctagaaaataaaaaatacactaaaaaaatggcagaaaggacatagaaaaatagagacaatgaaagaagtccagaaattaaaataaatatattccttttatccttcagattaaaattatctatatacagcataagtccggcgatagtaccaacaacacccggctcatcaaaagggccacaaaatcttaatgattgaaaataaacatcaagacctgcccctaaatagttgggaataactaaaaatggatatgcaatataattatatgtttttacagcattcaaaggagctattatttttccagggacaggaataccaaagaaaagtaacagccataccaaaatggatattccaattattatagaatataacgttttgtacctatcaaacacgttaaccataaatcttttcgatccaaaaggtactgctgccaaaataatcataaaaaagaatcctatcagattacgattttgagaaatagaagctaacaaaagggtaaaaacaaagaaaaacagatacagcacattcaatctattcattctataattccgccagaatagaatcgccaatgggaaaagaaatacaatttgcgcataagacccacttagactccaagtaaaaaatggccttagagttaacaaaagtaatatacctcctataaaataagttatgtcattactatttttaatcctcattataatcaatcatttttttcagtttatcagtgctgacaatgtaatcagcatgtaaatctactgtactatcagaaataccagctaaataccgcattttaacatcgacaatattagcaatagtcgaaaatattggagaatagtttcttatggatctaaaacaaataaccttacaaccgctatgacaaaacaataaatttgtaaatgcagctccagaaccacccacaatatagtcagcattattaaacaaggccatttgctcacaaaaagtgtatgtttcgggagcaacaacttcaaacccatattctttaagtactccccaaacttcagattcattataatgcctcttttttgtactcttccgtgtcagaaaaatgcgtttcggagttgctaaattagacttaaacaagagcaatttatcacgcatttgcaatgttaaatgacaatcaaaaacaaacccaaataaatgatcaggatcagtaatatctctataatgaggtgcaatagaattcacagcagaaagagaatataaagtaccaaattctactatttctttttctcctatagtaattatgtcacgttgggtttcattaagaatctcaaaaatctttttaaaagaatctattttcattacgatttcatcgattatcaacggagcatcttttgatatgtttattctgttgaagacaagcagtttaatgagaatttcatacaattcatgatagtaattacatgaaaatttccctgaaagcataattccagacttcaaataacgacatttcccaataccgccatcgttacgtaaaacagcaacattattctttaaccgcaataaaagcccatcaaacatcacatagcgatcgttcatattataacagaagtcgttaattacacacttttctttcacatttaagataaaatcggaatttccttgtattctaacaccttcatgtttataaataaaaatatcttgcatcggaactgatatcagttctttcttcaaaggctccaactcataggttaacttacttgtataccctactctattagtaataagtggtattatagatgaagtcaaatgcgatttcgcatagacatgatgactaacaacttcaaacggtacaaacgaaacacaacgtaaaaccatattattcatcgcatataaacaatgcccccaactgttcttttttgaatgataatagagtctacatgatatactttctatagcatttccgattcttttatttattgaatgttttatttcgagcaatattttcttcatcatccatcatattagtttttacgatgtaatttgtttattataacctgcctaatccctatcctacgatctagtcccgtatatgaataatatgtcgttaaaactaaaaacactgtcaccactgcgtatccactccagccaaacattaatattttgcaggtaaggactatggcagtgatacaagaaaatagtataaataatttcattattgatctggtaaatttgagattacattttattcgacaaatgatccatagctgcaaaaaatagaatccatatttaatgaatgatgatatgccaagtcctattaatccccaatagtaataccctatcatattaaaaattaatccataacaaactgtaataaattcattccaaaagtatactttggaatcacctttcgctaataaaccataagacatactccacgccatggctttaaaaaacatggctgccattgcccaatacatcataccttcagtaggtataaactttgtagaataaagtactactacagctacccgtatataagcgataaaagcaataattattggagcaagcaacagtaacgaaatctcagcctgctgattaatcgccctaacaaatgagtcattatccgaagctatcgctgacaatcggggataataatctgttgccatagccgtaaataccaatccaacatatgtgttgactattgtaaaccccgcattgaacaacccgacatcatcaatagaacccatacgacttatgaaaatacgaatgaaataggaagctaatattgccaacataccctgaagactgatcaacactcccatcttcaacatatctcgcccttcaacttttatatccgtaatggttatttcttccttctcaatctttattttgcgggcatatatataagacaggataaaaatcaaagcattcgaaaacaataaaacagggacaatagcatctatcttccaaaaataatataacggtatgataaatattaaaccgactgcattgccaactacattggccttcgccaaataacgatacttccgcatcccctgcattaaagcattttgcccggaagttaattgcatcaataaaaccgagaatgaaagtattataaaagcaaaagtaaaatctgtatttccaaatgtcacttgacttaacaatgaagctgaaaccaaacaaatcaatgcacctgtcaatccggtaatccaaaccaatctcctaaatacagaaataattaaagctatacgtttagtatcattggctccgttagcttctgcaatattacgtacggcactggtccctaaaccacaatttgtaaaggatgaaatcattgtaatggtagaattaagcaatcccataacccccatcccttcagggcctaataatactgcagcaaatttagacctgatgatttgtataagtatattaaagatttgaacccctccaaacaatgatgtagcttttaggctttgtttatacgagtttctgttttcagtgtccattgcttctgacattcctagtattattgaattaatcttccataattcttctcaagaattttgcaggtaaccctacatgtatttcagagtctggtatatcatgagtaaccaaacttcttgctcctgccatagcaaaattgccaatctttctcttttctaaaactgtagcacctatagaaacatcagcacacttacctataaccaccaatgaaccggttatcgaacccattgcaaaatgacataatggtccacatttaacatcgtgtccgatacaagtattggattttaccattgtccctatgcccagttctgttcgaggagcaatatatgcatgacacatgaccactacccctggatgaagaaccacgttctctccaataaatgctgtataatgtattattgttactaatctatccaatggaacatttagtctcttaaacagttcttctgtcaagacatttcgtcctatcatatgtattccccatataaaataatacccttcatcgacaaaatgctgaattctatcagtacctcccaaaacagcatactcatctacattatctacaaaatcgttcacaaaaccacagatttcaatatcttcatcgtatccgtttttctgattatcttttatacaagctgcaataacagaaccatgtccattaccaccaattatcaatacccgctttttcattttgtattcttatactccaagaaatccttatatattcgtatataatcagcttcatcataaggcattgaagcaagtaccaggcacactgctccagatgaaaagttatccagttctctccacattcccggaacaatatatagaccttgataaggacgatttaatgaaaaggtacgtttcacactgccatcatcaactgttacattaaaactaccgctagcagctatcaccagctgaaacaattctttatgagcgtgtccaccacgcgcctcgccacctggtatatcgtatagataataggtacgttttacttcaaatggaacagttttaacattttcaaccacagtgatattaccttcatctctgtgatgcttatcaagctctataattgtgcagtcatagactgtactatttttactcataatgcagtatttttgaaagtttcgtaatcacgtatataatcattttctccatatggagttgaagataatattaaagctaacgaattagtagaaaaattatccatctgtctccatatctgctttggtacgtacaatccatagtatgaacgattcaaatggatttttctcctctctttaccatcatccaagagcacatcaaaactaccggaaagtgcaataataaattcctgattttctttatatgcatgccctccacgtttctctccaccagggacatcgtatatccaatatgtccgttctattttaaatggaatatgcttaaattcctcggcaaaagagagattacctcttttatccaaaaattttggaagatcaatcaacctacaatctgatacattcataacttttatattttgtacatactttcataatacttattatactctccactcgctatattttccatccattcgttattttccaaataccagcgaacagttttttcaataccttcctcaaattgcaaagacggttcccatcctaattcttttttcaacttattagaatcaatagcatagcgtaaatcatgtccttttctgtcagctacatatgtaatcaacttttcggaagtaccgtccggattacccaataaccgatccacagttttaatgataaccttaattaaatcaatatttgtccattcattgaaaccaccaatattataagtctcagctatttttcctttatgaaaaatgatatcaatagcacgtgcatgatctactacatacaaccaatcacgtacattctcacccttaccataaaccggtaaggctttaccatgacggatattattaataaaaagaggtataagcttttcgggaaattgataaggcccgtaattgttactgcaattggtaacaataacaggcattccatatgtatcatgaaaagcacgtacgaaatgatcactaccagccttgctagcagaataaggactatgtggctgatattttgtttgttcagtgaagaatgttccgtcaaaatctaatgcaccatatacttcatctgttgaaatatgataaaaaagtttatgatcatatcccgtttctgaagtttcccaagccaacttagctgcctgtaataatgaaagggtacccatcacattcgtttgtgcaaaaataaatggatctttaatactacgatcaacatggctttctgctgccaaatgtatcacactatcaatattatactgtttaaaaagctgtattattctctcaaagtcacaaatatcagcttttacaaaagtataattcggctgaccttcaatatctttcaaattagctaaatttccagcataagtcaacttatctaaatttataatatgatactcaggatatttattcacaaataagcgaacaacatggcttccaataaatcctgcaccaccagtaatcaatatattccgcttcatctttctatttctcttttaattcatctattacattcatcaagtatttcccgtattgattctttaacatcggctgtgccaatgccatcattttttcaggagtaatccagcctttccgaaaagcaattccttctaaacaagctatttttaacccctgacgtttttctatcacttcaataaaattactagcctctgataaagaatcgtgcgtaccagtatcaagccatgcaaaaccacgtcctaaaagttggacttttaattctttagtatccaagaaacattggtttactgtagttatttccaattctccacgtgcagatggcttgctattctttgctattttaaccactttattgggatagaaataaaggcccactacagcatagtttgattttgggtgaacaggcttttcttccaatcctaatacattaccgtttttatcaaattccgcaactccataacgttcgggatctgatacccaatagccaaatacagtagctttgttttcttcttcagccatgcgtacagcttcttttagcatataagtcagcccctgaccatgaaaaatattatctcctagtaccaagcaaaccgaatcatcaccaataaattcctctccaataatgaatgcttgcgcaagaccatcaggcgaaggttgttctgcatattcaaaacggacaccgaaatcagaaccatcacctaataatcgttgaaaaccaggaaggtcatacggagtagaaattattaaaatctcacgaatacctgcaagcatcaaaaccgaaatgggataataaatcatcggtttatcaaatatgggaagaagctgcttactaactcccttggtaatagggtacaaacgagtaccagatccaccagctaaaacaatacctttcattttaatataatctgtttaaatgtgtgcgcttatctctcactttatcccaccaaagatttaaagcaatccaggctacaatatctcctatcaatatcacagtattattcacccatggtatcaataaaatatttacaacactaaatgcacaggatattaatattataataatcatagctttacggggtgtaaatcccattgccaaaaatttatgatgaatatgattcttatctggttcaaaagggctctttccattacgcaaacgtaccattaccacacgaatcacatcaaaagctggaattattaatgtactaaaggctataagaaaagtacctttggtattagaaattacctcaggattgttctgactatatttgatagcaagaaaacttagtatataccccaaagttaagctgccggtatctcccataaatattttccgtgcccgttctgcattaccgaaaacattataataaaagaaaggaactaatacacctaaggtactaaacgcaagcatactatacatccacagccctttctctataaacaaaaggccaaagaccaaaagcgcaacactactcaatcctgatgctaatccatcaattccatctattaaattaatagcattagtaatgaaaacaatggtcaatatagtaaaaggaataccaatccaatttggaattgcatatattcccaataacccatataagtcatttatccaaagctctgcgacagaaaaaaaacaagcacagagaatttgtatcacaaacttttggcgataacgcactccaataaggtcatctgtaattcctgtcaaatataaaagagtcaacccacagactaaaaacaaacattccaataaaaaacaagttgcatgtaaatctgaaatataatatcctgttatagtacggaatgccaataccaaacaacaagaaaataatatcgttggaaaaaaagaaactccccccaaacgtggaatggcacatgtatggattttacgtttatctggtatatcaaataatctcttacgaagagaaattagtaatatgcgaggtatgacaaataacgctatacagacagaaataacaaaagctaagattataaatatataattcattcgaataattatttcatgaataaagtttaatattaagccccatttagttgatgcaataattcatttttatacagcaacttgattttcaatcttttccacatacccaaccggcatatccgcacaagcgcaccccagcatattcaaccggacagcaatcttacttctgccatccaccgtgacaagctctcctacaagaccagtcaaaggacctttgacaacacgtactttttcaccacgtgccaaaggagcgctattcatacagattgcctcttcggaatagtcgagcataaaacggaaacgggccatttgttcatcaggaatgatagtcggactactctcaccgcgcattaccatataacgactaactgtagaaaaggaaagaacctctttacgttctttaggatcagcatgtacaaaaaccatcatcggaagcaacacggattcaaccactttacggcggtcactccattgatgtacttcttgctggaccggtacaaaattttcaatccccattttatctaaacgctcggctactttcttctcatgatgcatacggaccagagcaacataccagcgtttagagtgtgctacgccttcccctgtcccaattttaggcccagcacttaaagtttctttcgttagaatcatacttttttaccccttaagtttccgttacttcttaggtaacggaaattatagagtactggacacctaccacaaaaagaagaagaaatacgtacgaacaagggagtttagatacattttgcctgatatacagagatatttgaaaagtataggcagtcgaattcatagaacatgaaataggaatgtttcatgtcccgatacatttttactgtatatttaaataaaaagagaaaaaaaaggaattttgcttgtatgttattaacaaatttgtctatatttgcaccgaataatttccgttacctaagaagtaacagctgcgtatttagactggttatcaaagacttaatatacttttcaaagaattcccctataattcctaacgtaagaataattcaaccgatttactttggtacgctcattcaattcaaaacctttcaagtaaatttgtgttgtcttaatagatttatgccccaatgactcgctaatcatttcgataggtactcccctgtatttagcggtagttgcccaggaatggcgaaacgtataagaagttacggatgaatgaatacgtagcttcttggctaaactcttcaaatcattattaaaacgacgcagagtggattgatattctatatatgccgcttcgtcatcccgtttattctttccacttaatatataaaaaagataatccggatgctcggggagaacagcggaatgcgtattacgaagtcgggaaacaatacatgaagccgattctaagatttctatactcattggagttcccgtcttgatacggttgtacttcaatatattcccctccaaattcgacttttccagatgagcaagatcggcgaaaggcattccgcaaaataaaaataacaaattagcgatggcttgcgtccggcgaagtttttcggactgtggatctttataaagcagcgtgtgtaattcgtttataggaattgcttttttctgacgagtatctactccggtaaagacatcacgaaacaagcgatgaatataaggagcctgatgagtatctactcccttattgtatatgcaacgtaacattcgcatataggtggaaatcgtgttcaacttcaagcggcaggacatcagataactgctataccgcttcaagttctcacgagtaatcaaactgaatgacacacactctgttccacaaaatatggtgaaagagcgaagtgcattctcataaacatgtgctgtggcataacgcccttcctgacgcaaacaatttatataattatttgcacatacggtaaatccgtcttttctcataatttactttctatattaattgattaaaataagtttgatattacgagaaatagaacgaatttacaacaaagaaggtgatttacggtcgttttcttataaagtttttagtaacctatacgatttaatactaaatttggctatttatcagaaagtgatagtgcaagaacttccccattggatactggttttgttttccgtattccacaaacattcacgagccgttaacaagcgttgattcacatccatggtaactacaataaaggaaagtagacgttcgtcagcagaagaatactcacctttcataggggagtccacccggaaaacaggtaaatcaattgttccatttaccccattccaggtataaaattcattgtaattcttatctccatgaaagtaagccttaatcatagaatgagaatggataaactgctccagcttttcccaattctttgtggctttctttttgacatcagtcaccagacaggtatctgccaacaaattctgaaacttatctactgaattgatcgtatgcttaccgttcggattcgtaaaatgcttggtatcggcaatgggaggatcgtgggtaaataaaataacaggaataatcgtatcggttcctatttcctgatcgaaccattgacgcatatatgcatcaggccacattcccataaaaacaaaccgtaccccgtcctttacaaaggaataatgcaccttatccgtttgataattaaaagtctccgccgtacgttccaccgcagggcgcatcatccggttgaaaataccggcagcactggatgcatctttttctggagataaaaccttggaataacctatcgcattagaaatatcgtgattacccggtaccagatacaaaggagaacttatcgatgaatcccaatcactgcaaaattgactccatgatgtagtagcagattgaactccttcttccatccgattggcaatatcacccgtacaaacaacaaaatcaggagaaccgaattttattcctgcacccaccccactatcttccggcagccgagtttcagaaagcaatttgaaggttgccaacatagcacgacttacctcatcacttcccacttcttttccccgaaattcacgttcaagaccataatgtacgtctgaacaatatataaaacgaagaattcttccttcgtctgctccgacagcggtgcagctaaaaagaagaattcccgtaaataataaaaggattagctttctcattccttacaattataatcttaccattctatttttgtacttagtccggcagtggtgctattactctcaccttgagtggctttcatcatataccattcagcaccgttatccttacgggcatacgccattccctctgtttctccattgtatttaggtgtttctccccaaacctcttcaccggcatccgttagattcttgaatacgtctatggcagtttcttccggtgaaagaagctcaatcttcacagattttttagcggagagtccacttgtaaagcctgtagaataatccgcttgatccgaaagaagcactaaaaaaccatgagactgtattttagtcccttcgggagctatataaacaatatccccatcatcttttttaatctttactccggttatatccagttcacgacctgtactattatacaactcaatatatttgggtttattaccgttcaactcattcagcaccaatccaatataatcaataccggaaggtccttcaggttccgtaattttattagctgttcctttagtagctttcaatacaacagtccattctcccgtaccgtcaggaatacgtgaataactgcctcccacttcatgtttacctccatcaccaaattccgcatccttatcaaatttgtctatatctttaccagagggcatttgcaaagtgatagaaacagatttagtatttgagattccttgagtaaaatcaacgcctttgactttcagcaaatatgctttaccggcaatggctgccccttccccaaatgtataaataatctccgaaacaccttcttcatcagttttcaccagtttaacgccattgagattaattgttgtattggaagtattataaatctcaatccaatcttcttcacttgcattcccatcgtttccacaaatttcattcaataccaatcctgaataatcaatatcagtaggaatttccggttccgagtcatctttacatccaaccaaagccaaagcacaaagtgtgctcatcagcaaaaactttttcataatcatctttttttaatttatatcgttattcgcgtttaaaaagaaatcattgtacgcaactgaaatacattaaaatcgattcctgaaggcattacttcacttaaaggtttacctcccttggtaatttgtcctttagagtcggcatatttatcattattcatataaatgtaattcagtccaatcaccacattacgtacaggataccagttcaacgaagcagaatagctggttgccttacctcctgtaatatacgcagccggatcatggaaatcattcatatttatattactgatacgagccgcaacttccaaattcccccctttacgacgcattttcattggaccaaattccgcctcatccggggagtattgacggttttctcccaatatcatataagatgccgtagcataccaaccattaaatactgcatttttcaaatcagtcttttgattattagcaccatagatatagcgggatatgttgttataaatatattctccataagtcagtaacttacgataacggaatcccagttcgaagcctgtagtataataatgattgacattcgaaatctcggcttgcacaaatcggcgacggtctaccctgctctccgggaaagtccggaaaagaaccgtcttatcctccagccctgaaccggaaggtgtctgatagttaaagtatccgccgacatgaatcgtcatatcttcattgtaaataggcgacactgctacacgggtagccagagcataaccgtcattccctctattacgctctttctgaatgatatccacttccctaccaaatactccagcggaagcccaccaatgttttccccaaccagttccggcaagtcccagacggcgcccgtcagcaaaagcttccactgccatcggacgttccgaagccatcagatatttagaactcgttgtacgttccatactcatcggaactttaaaatttcccgcctttacaaagaaatgattattaaatttatagcccagatacatatcttttatttccacttcattgtaagcgaaatccagatccagttctgcaaaccattttttgtataaagtggctttcacaccgaaacgtgcacgacgaatactcaccccgttgctaaaacggaattgattgtcatcgtcctccagatccttgttcgttttggatgtcagatcatccacattcgacgtgggcgaataaaccgctgcatccaaataaattcgattatcaaaccataaatgaaagttttcatttttagaagcaaagtgaagttttccactctcaaaataagcctttacaggtatcttacccgattcatcttcccaaccggaagtcgtgttttgtccccatactgaagtaaatgccagcagaccggcaaccagaatcatgtttctttttctcatatcgtatctctatcgttttgcaggcgcaaagtaaacgacatggaaataccaatgaatgacagagttattacatttctacaacaacaaaggccgctcccgaataacaggaacggccttaccattttcatttcaatatgatgtcagcctcttttcaaaaagatgacattctgcttatttatactctgcccagctcttgatagctatatcatccacactcatcgtacagaaggcattgataaatgcactagccagacgggcattcgtaatcaacggtatattcaagtcaatggcagcacgacggattttatacccattacttaattctccggctgtcagattcttcgggatattgactaccatgtcaatctccttgcgatgaagcatctccaatgcttgcggatgtccctcctcactcggccaatagacatgagtactttcaattccattctctgcaagcgttttgtgtgtaccacccgttgcaaagagtttgtatcccttattcaccaacatacgggccgcatccatcatatcggctttctgtttcattgttcccgtagacagcaggatattcttcttcggaatacgatagcctacggaaagcatcgctttgagtacggcacaggaagtatccattccgatacaacccacttcaccggtagaagccatatctactcccaacaccggatcagccttctgcaagcggttgaaagagaattgggaagccttgattcccacataatccagttcgaagagatttttttccggtttctccacaggcagaccgagcattactttcgttgccagctcgataaagttgatcttcaacactttgctgacaaacgggaaagaacgactggcacgcagattacattcaatcaccttgatatcgttgtctttcgccagatactgaatattaaacggaccggagatattcaaagccttagcaatctcacggctgatacgcttaatacggcgaacagtttctacatacagcttttgcggcgggaactggattgttgcatcgccggaatgtactcccgcaaattcgatatgctcacttatagcgtatgctacaatttctccattctgcgccaccgcatccatttccacttccttggcgtgttcgataaactggcttactaccaccggatgtttcttcgatacattagctgccagtttcaagaaacgttccaattcttcctggttggaacaaacattcatcgcagctcccgaaagcacataagacggacgaacaagtacggggaaacctacctcttcaacgaactcctgaatgtcatccatagaagttaattcacgccaacggggctgatccacaccgatacggtcaagcatggcagagaatttctcacgatcttcggcattatcaatactcttggcactcgtacctagaatattgatcttctgtgcatccagacgcaaagcaaggttatttggaatctgaccgccggtagatacaattaccccatgcggattctccagttccagaatatccatcacacgttcaaaagtcaattcatcaaagtacaaacggtcgcacatatcgtaatccgtagatacggtttcaggattatagttaatcatgacactgcgccatccctctttgcgaatggtattcaaagcctgtacgccacaccagtcgaattctacggaagaaccgatacgataagcaccggaacccaatacgacgatggatttatggtcgcccagataacgcacatcatttgctacaccgctataagtaagatacagataattggtttgtgccgggtattcggctgccaacgtatcgatctgtttcactaccggaagaatgcctgcctctttacggtgtttgcggatataaagaattccatcttccatatcaccttcgtaaccgatggcacgggcaatctggaaatcggagaaaccttgaaccttagctttacggagcaattcgttcggcaaatcggcaatctgtttgtgattgtttccccaactatgcagttcttcggaagtcttcataatattcattaacttctgcaagaaccatttatcaatcttagtcaattcgtgcacctgatcgatggtgtagccggcgcgaaacgctttcgagatcacgaaaatacgtttatcggtcggttcgcgcaaggctttatcaatgtcggaaataaccaattctttgttctccacaaaaccatgcattccctgtccgatcatacgaagacctttctggatagcttcttcaaaagtgcgtccgatagccatcacttcacccacagatttcatagaagaacccaactctttatctacaccgtggaatttacctaaatcccaacgaggaatcttacatacgacataatccagtgccggttcaaagaaagcggaagtagtcttggttacagaattcttcaggtcgaagagtccataacccaatcccaatttggcagcaacgaaagccagcggataaccggttgccttagatgctaaagccgatgaacgggaaaggcgggcatttacttcgatcacccggtaatcttcggattcgggatcgaaggcatattgtacgttacattcacccacgataccgatatggcggatgatacgtattgccaattcccgaagtttatgatactctttattggtaagcgtctgtgaaggagcaataacgatagactcaccggtatgaatacccagcggatcgaagttttccatattacaaacggtgatacagttatcgaagcggtcacgtaccacttcatattccacttctttccaaccgcgtagtgatttctccaccaatacctgtggggagaaagagaatgctttttctaccagcacatccagctgttgttcattatcacagaaaccggaccccaagcctcctaacgcataagcagcacgaacaatcaccggatagcccagttcttttgctgcgcgacgtgcatcttccgcattttctacggcttcactcttgatggtttttacattgatctcattcaatttctgaacaaaaagttcacggtcctcggtatccataatggcctgtaccggagtacccaacacttttacattatatttttcaagaataccttctttatacaatgctactccacagttcagagccgtctgaccaccgaacgccagcataataccttccggtttttctttttggatcactttctctacgaagtacggagtcaccggaagaaagtaaatttgatctgccactccttcggaagtctgcaccgtagcaatattcggattgataagaatggtttcaataccctcttctttcaaggctttaagtgcctgtgaaccggaatagtcaaattcaccagcctcaccgattttcagggcacctgaacctaatagcaatactttctttatattttctttcattgttacaatagttttacaaattcgtcgaacaggaattccgtatccgtaggtccactcgcagcttccgggtggaattgcgcagagaaccagggattctttttatgtttgattccctcgttggacccatcgttcatattgataaacaacggttcccactctgcactcaacgtattattgtctacggcataaccatgattttgtgaagtaatgaaacaacgttccgtacctatcatacgcaccggctgattgtggctacgatgtccgtatttcaatttataaatcttggctccgcccgcttttgaaagcaactggttacccatacagatgccgaagataggcagtttctcatttaccatcgccttccgtatattctgtaccgcagcatcacaagtatccgggtcacccggtccgttggagataaacaacccgtcaaattcgagtccgctataatcataatcccaaggtacacggatcacttctacattacgtttcagcagacaacgaataatatttgtctttacaccgcaatctaccaggataaccttcttaaattgagaattgaaagttgagaattgagaattaagctgcgcataggaactatttacggagaaagtttgtgaagttccggcaggaagatagcaaataatctctttgcaagatacacgatctacataattgacgcctgcgtatactgcttcaggcacattatccggttcatcatcgaaaacgatttttcccatcattactccatgttcacgaagaaccttagtcagctcgcgcgtatcaatgcctgtgataccgggaatctgctcgcgtttcaaccagtcaccgagactttccaccgcattccagtggctgtattcataagaatagtcacttacgataatcgcttccgcatggattttctcactttccatgaaagtggcaagtccattcggttcgatggtaaaaggaggaacaccgtagttgcctaccagaggataggtaagcgtcatcaactgtccggcgtatgaagggtcagtaaggctctccgggtatccggtcatggcagtattaaaaactacttcgcctgccaccggcttctcgtagccaaacgacttaccggaaaaccggctcccgtcgtcaaggattaatgtcacatttctcattcttattattgaatcgttgtatggttgttagaattgatacatttgttctatatagtcgatgaacgcccggttcaccattttcacacctcccggtgtagggtagttaccgctaaaataccagtcgcctttatgatgcggacaagcctcgtgcaatccctccaacggttgatagacaatttccactttcgcctttgttcccttgggagtcagcagttccaccatcttggcagagatttcctcatcggtgaacggagcatagatattcttcacatagtttatcatctgctctttcggcagtcccacctgatctttcgatttacggtaggcagccgcaatcacatctttcatatcccgctcctttaaaagttcgacagcagctcggaaagcgataaactcactcatctttgccatatcgataccgtaatagtcaggataacgcacttgcggagaagaagatactatcacaatcttcttcggaccgagacggtcgagaataccgataatactttgtttcaacgtagtaccacgcacaatgctgtcgtcaataatcaccagattatcaacaccgggtaccagacttccgtatgtaatgtcatacacatgggctgccagatcattacgactgtttccttcggcaataaacgtacggagtttgatatccttgatcgccaccttttcgctacggatgcggcgggaaagaatgacttccagttcctccatatccggatgatgccctaatgcagcaatttgctgcactttctcctcattcaagtaatcgtccagtccctgcaacattccgtagaaagccacctccgcagtattgggaataaaagaaaaaaccgtatgatcgatgtcattattgatagctttcaatattctcggaaccaacttttcacccaaccgtttcctttccttataaatatcgacatcactcccacgggagaaatagatacgttcgaaagaacaggcatgattttcgcgcggcttgttaatttgcgaagtacggattttaccttctttgctgattaacaatgcttgccccggttgcaattctttgatttcctcaaacggaacattcaaagcagtctggatcaccggacgttcggaagcaagaacagctatctcatcatcctgataccagaatgcaggccggattccccacgggtcgcggatggcgaaggactcgccgctcccggtcaatccgcagatcacgtatcccccatcccattcgcggctggaagtgcgcaacacgtttgccaaatcaatatattcttctatataatgagtgattcccatgcccgtaagcccctcggcttcggcaagattgaatacacgctccacttcacggtcaagacggtgtcccacctgctccaacatgatatatgtatcggcatatttacgcggatgctgaccaatggcagtgatacgggcaaatatctcgtccacatttgtcatattgaaatttccgcagagggccagattcttggcacgccagttatttcttcttaaaaatggatgcacataagagattccggattttcccgtagtggaataacgaagatgtcccatatatacttcaccggcaaaaggcaaagttcgtttggcatacgctgcatcgtgcaactgttcgggagtgagatccttaaaattgttttgaacgttttcaaagatttccgtaatggctccggaacctaaagcgcgttcacgaaacatatattcttcacccggatttgcttccagtttcacacatgccagtcccgcaccttcctgtccacgattatgctgcttctccatcaacaggtagagtttattaagaccatacatccatgtcccgtactttttctcgtaatactctaacggtttgagcaagcgtatcatggcaacgccacattcatgtttcaattgttccatctctctatatactagttactacttaaagttactctactgttaccgacttcgccagatttctcggctgatccacatccatccctttgcataccgcaatgtggtaagcaagaagttgcagaggtaccgtagtaattaacggatcgagacattcgattgtttcaggaagttcgatactacagtcagcgattttgctgataacggtatctcctttcgtcacaaatgcaatcacttttcctttccgtgccttaatctcctgaatattacttactactttctcatacaacccattctgggtagcaatcaccactaccggcatttccgcatcgatcagggcaatcggtccatgcttcatctccgcagccggataaccttcggcgtgaatatacgatatttctttcaatttcaatgcaccttccagagcaacgggataactatatccgcgtcccaggtaaataaaattatgcgcataagtgaaagttttcgataactccgccaaagtatcattcaattccaacacctctttcattttttccggaatatgatttaactcctgtacgattgaaagataatgctgttcgtcaatggttcctttcgctttggcaagtgtcaatgccaacatcgccaatacagtgacctgtccggtaaatgctttggtagaagccaccccgatttctggacccacatgaatatatgaaccggtatgagtggcacggggaatagaagagccgatcgcattgcaaatgccatatataaatgccccgcggcttttcgccaattccacagcagccaatgtatctgccgtctcgccactctgggagattgctatcaccacatcctgcccgtcaatcaccggatcacggtagcggaattcggaagcatactccacttccaccggtatgcggcaaaaactctcaatcagatgcttaccgatcagtccggcatgccaggaagttccgcaagcaacaataataaaccgtttggcattcagcagcttttcccggtgatctatcacagcagaaagcaccacattatcagcttccacattgatacgtccgcgcatgcaatcacgaatacaatcgggctgttcgaaaatctctttcaacataaagtgcggatatccccctttttccaactgaccgaggttgagttccaccttctttatttcaggtatcatttcgacattgttcaagttgactaccttcaactccttccccagattcaaaacagctatttccccgtcttccagataaaccactttatcagtatattctacaatcggagtagcatctgaagcaagaaagaactcattctctccaatccccactaccaatggactgctcttacgggcagcaataatctcatcgggatgctccttatcaagaatcgcaatcgcataagcaccaattacctcccctaacgccaactgaacagccgtcaacagactgacctgattagtgactttcatgtattctattaattgaacgaggacttcggtatctgtactacttttaaaaatatagcctttggcttgaagtttttctttaagaacggcgtagttttcaataataccgttatgaatgagagcgagcttttcggaagaagagtaatgagggtgggcgttagcagaacaaggttccccgtgagtagcccaacgggtatgggcaattccgattgtaccggaaatatctttctgtgtgacgaaattttcaagatcagagacttttcctttcgtcttatacacatttaactgttggtcatcactaatgattgctacccccgcgctgtcatatccacgatactccagtcgcttcagccctttgataaggatagggtaggcttttcgtttaccaatatagcctactattccacacatattatgatatttttatttcgcctgcaaatatacacattacaaataacataaagacaacaaaaagcatatttatttgacagaaacgcataaaaaagttgcaaacacatcaaaaagttaaataatatattatttttagctcaaaaagaaacaaattacaatcagcttcaaataaggataaataagctaacaaattaaaagcaaatttcctgtttttaataacaaattaaaagaataaagattcctattctcatttcgcgtcacacaaaagctaaatttcactatcattttgaaattaaaatattaactttgccaaacaatttgatacatcaaacaggtattatcatacaataaagctagtaagaatgaagaaacaagaactttttaacaacgtaacagaaggattcccttaccaacgacagccccaacaggtaggcttgtacgatgcggcatacgaacacgatgcctgcggtgtcggtatgctggttaacattcatggagaaaagtcacacgacattgttgagtcggctttaaaggtattagaaaacatgcgccatcgtggtgccgagggtgcggataacaagaccggtgacggtgcaggtatcatgcttcaaattccgcatgagtttattttattacaaggtattcctgtccccgaaaaaggacggtacggcacaggattattgtttttaccgaaaaacgaaaaagaccaggcagctattctaagtattattattgaagaaattgaaaaagaaggactcacattgatgcatttacgcaatgtgcccacctgccccgaaatcctgggagaatcggctctggcaaacgaaccggacatcaaacaagtgttcatcaccggatttacggaaacggaaactgccgaccggaagttatatctgatccggaaaagaatcgaaaataaagtcagattgtcatctattccggcaaaagacgatttttatgttgtgtcactctctaccaaaagcattacatataaaggtatgctttcatcattacagctgcgcaactattatccggacctgacaaatagctattttaccagcggactggcattggtgcactctcgtttcagtaccaatacattccctacatggggattggcacagccgttccgtctgctggcacacaacggtgaaatcaatactatccgtggtaaccgaggatggatggaagcccgtgaaagtgtactctccactcccactttaggcgatataaaagaaatccgcccgattatacaaccgggcatgagcgacagtgcttctctggacaatgtactggagttcctggtgatgtcaggattgagcctgccacatgccatggctatgctcgtgccggaatctttcaacgagaagaacccgatcagtgaggatctgaaatcattctacgaataccactccatcctgatggaaccgtgggacggaccggccgcactactattcagcgacggacgatttgccggaggtatgctcgaccgcaatggcctgcgccctgcccgttatctgattactaaaaacgatatgatggtagtggcttcggaagtcggtgttatggatttcgaaccgggagacatcaaagaaaaaggtcgcttacagcccggcaaaatcctgctggtggatacggaaaaaggcgagatctactatgacggcgaactgaaaaaacagttggctgaagccaagccttaccgcacctggctatctaccaaccgaatcgaactggatgaactgaaaagcgggcgcaaagttcctcatcacgtagcaaactacgaccggatgcttcgtactttcggctactccaaagaggacatcgaaaggctgattatgccgatggcaagcaccggagcagaaccgatcaattcaatgggtaacgatacgccactcgccgtactttcagataaaccacagttgctttacaactatttccgtcagcaatttgcacaggtaaccaatccgcccattgatccccttcgtgaagaactggtgatgtcattgacggaatacattggagcagtcggtatgaatattctgacgcccagtgaaagtcattgcaaaatggtacgcctgaatcatccgattttaagcaatacccaactggatattctttgtaatatccggtataaaggcttcaaaacagtcaaactacccatgttgtttgaggttgccaaagggaaagccggactgcaggaagcactgacccatctttgtaaaatggcggaagaatccgtgacggaaggtgtaaactacattgtcctgaccgaccgtgaggtggatattacccatgctgccattccatcattgctggcagtaagcgctgttcatcaccacctgatttcagttggtaaacgggtgcaaacggcattgatcgtagaaagtggtgaaatacgtgaagtgatgcacgccgcgttattgttgggtttcggagcaagtgccctgaatccttacatggcattcgctgtcctcgaccgactggtaaaagacaaagatattcagttagattataccactgctgaaaagaactatatcaaatccatctgtaaaggcttgtttaaaatcatgagtaagatgggtatctctacgatccgctcctatcgtggtgctaagattttcgaagctgtcggtttgagtgaagaattgagcaaggcttattttggaggactcggttcaccgatcggaggtatccgtctggaagaaatagccagagatgccattgctttccataaagaaggatttgaaagtattaaaaatgaagagttattaaaaaataacggtttgtatgctttccgtaaagatggagaaaagcacgcatggaatccggaaacaatcagcactctgcaattggctacacgactggggagttataaaaaatttaaagagtacacccatctggtagacgaaaaagagaagcctattttccttcgtgactttctgggattccgtcgtaatccgatttcaatcgatcaggtagaaccggtggaaaacattctgcatcgtttcgtcacgggggctatgtcttttggttctatcagcaaagaggctcatgaggcaatggctattgccatgaataaaattcacggacgcagtaataccggtgaaggtggcgaagacgctgcccgtttccaaccgctgcccgatggcagttctttacgaagtgcaatcaagcaggtagcttccggtcgtttcggtgtaacggcagaatatctggttaatgcggacgaaattcaaatcaagatagcacagggagccaaaccgggtgaaggcggacaactaccgggatttaaagtgaacgatgtgattgcgaaaacacgtcattccattccgggaatttcgctgatttctcctccgcctcatcatgatatttattcgattgaggatttggcacaattaatcttcgatttgaaaaatgtaaatccacaggccaaaatcagtgtgaaactggtagcagaaagcggcgtcggtacgattgctgcgggtgtggcaaaagcaaaggcggacctaattgtcatctctggtgctgaagggggaacaggtgcttctccggcttcttctatccgctatgcgggtatctcaccggaattgggattgagcgagacacagcaaacactggttctgaacggacttcgtggccaagtagttctgcaagccgacggacaactgaaaaccggacgtgacatcatcttaatggcactaatgggtgccgaagaatatggcttcgccacctcggcattgattgtattagggtgtgtaatgatgcgcaaatgccatcagaatacttgtccggtgggagttgccacacagaatgaagagttacgtaaacgctttcatggacgcagtgaatatttagtaaactttttcacattcctggcacaggaagtccgcgagcatttggctgaaatgggattcacccggatggatgatatcatcgggcgtacagacttaatcgagcgcaagtccgatgccaatgacccaaatccgaaacatgctttaatcgacttcaccaaattgctggcacgtgttgacaacagtgcggctatccgtcatgtcatcgaccaagatcatggaatttctgctgtaaaggatgtaaccatcatcgatgccgcacaagaagctatcgaacatgagaaagagatttctttagaatatacgattgccaatacagaccgtgcaataggtgctatgctttccggagtaatcgccaagaaatatggtgccaaaggattgccggaacatacgctgaatgtaaaattcaaaggttcggcaggtcaatctttcggagcttttctcgtaccgggagttaactttaaactggaaggtgaagcgaatgattacctgggtaaaggattgagcggcgggcgtatctccgtattgcctcctatccgcagcaatttcgaagccgaaaaaaatacaatcgccggtaataccttgctttatggcgcaacaagcggtgaagtatatatcaacggccgtgtaggagaacgtttcgctgttcgtaactccggcgcagttgccgtcgtagaaggcgtgggtgaccattgttgcgaatacatgaccggaggtcgtgtggtagtcctcggacaaaccggacgtaactttgcagccggtatgagtggcggtgtggcttacgtatggaacaaggatggcaacttcgattatttctgcaacatggaaatggtggaactgtcactcatcgaagaagccagctaccggaaagagctacacgaactaatccgccaacattatctgtacacaggctcaaaactagcccgtaccatgcttgacaactggaatcattatgcagaacagttcatccaagtagtacccatcgaatacaaaaaagtattgcaggaggaacagatgagaaaattacaacaaaaaattgcagacatgcaaagagactattagatttacaatttgactatttacaatttactatttgaatgtatagtctgtaaatagtcaaatagcaaatgacaagatagtctaaaaatagtaaatagtaaatcgtcaaatagtaaataacaagatgggagatcctaaagcatttctaaatatacctcgacaagaggcgggataccgccctgtaaacgagcgaatcgctgactatagtcaggtagaacagactttgaatacaaacagccgtaaattgcaggcgtcacgctgtatggattgcggcgtacctttctgtcattgggcatgcccgataggaaataaacaaccggaatggcaggatgcattatacaggggaaaatggaaggaggcatacgaagtattgtcgtctacttgcgattttccggaatttacgggacgtatttgtcctgccctttgcgagaaatcgtgtgtgttgaaactttcctgcgatcagccggtgactattcgcgagaatgaagcagctatcgtggaagcggcttttcgtgaaggatatatacaggtaaagacgccgagaagaaacggaaagaaagtggcggtgattggtgcgggtcctgccggattggtggtggctaatcagctgaatttaaaaggatatagcgttactttattcgataaggataaagcgcccggagggttattacggttcggtattcctaatttcaaactggataagaatgtaattgaccgacggatgaagatattggctgctgaaggaatacagtttgagatgggagtagaaatagacgtcaatcatttgccggaaggattcgacgcttactgcatctgtaccggaacgccgactgcacgtgatttgagtattccgggacgtgaactgaaaggcatccatttcgcacttgaaatgctggcacagcagaacaggattctggcaggacaaactttcccgaaagataaattggtgaatgccaaaggcaaaaaagtacttgtgataggtggcggagataccggttccgactgcatcggaaccagtgtacgacaaggagccgtcagtgtcactcaaatcgaaatcatgccgaaacctcctgtcggctacaatccggctactccttggccacaatggccggtagtcttcaaaacgacttccagccatgaagaaggttgtacacgccgttggtgtctggcgtccaatcagttcctcggaaagaatggaaaagtgacaggcgtagaagtggaagaagtggaatggattccggctgcagatggcggacgtcccacgatgaaaccgacaggaaaaaaggaagtcatcgaggctgatatggtattattggcgatgggattcctgaaaccggaacaacccaaatttgcaaagaatgtatttcttgccggagacgctgaaacaggtgccagcctggtggtacgcgccatggcgggaggacgaaaggcagctgcggaaatagatgcttatctgacgaaatagctttgcagtaaggaaaaagcagaagtttgattagtactatctgattcgttccaccatggtcgaacgaaagaaacacccaggtggaacggaaagacaaccttggtggaacgaaagggaaaccaaggcggaacgaattaagaatagctagtcagcttctttgaaatagcgaataaacaatcaacagattacattaccccctctaaaaattaaagttatgtgtggaatagcaggtatactcaacatcaaagttcaaacgaaagagctaagagataaagcactgaaaatggcccagaagatccgtcatcgcggaccggactggagtggaatctatgtaggcggaagtgccatcctggctcacgaacgtctttccattgtcgacccgcaaagtggcggacagccgttatactctcccgatcgtaaacaagtgctcgccgtcaacggtgagatttacaatcaccgtgatattcgcgctaaatatgcgggaaaatataactttcagaccggaagtgactgtgaggtaattcttgccctttacaaagataaaggcatccattttctggaagatattagcggtatctttgctttcgttctttatgatgaggaaaaggatgaatttctgattgcccgtgatccgataggggttattcctttatatataggaaaagataaagagggaaaaatctacttcggcagcgagttgaaagcccttgaaggattttgtgacgaatatgaaatatttctccccggacattacttctatagtaaagagggaaaaatgaaacgttggtattcgcgcgactggacagaatatgaaaccgtaaaagagaatgatgcacaaaccgttgatgtgaaaatagcattagaagaggctgtacaccgccagttaatgagtgacgtaccgtacggagtgcttctttcgggcgggttggatagttctgtcatctccgccattgccaaaaaatatgcggcaaagcgtatagaaacagacggagcgagtgatgcgtggtggcctcaactccactccttcgccatcggactaaaaggtgctcccgatttgattaaagcacgtgaagtggctgaatatatcggtactgtccatcacgaaataaactatactgttcaggaaggtttggatgccctgcgtgatgtcatttatttcatcgagacatacgatgtaaccacggtacgcgcttccactcccatgtacctactggcacgtgtcatcaaatcgatgggtatcaaaatggtgttgagcggtgaaggcgccgatgaagttttcggtggttatctgtatttccacaaggctcccactccacaagcattccacgaagaaacagtacgtaaactttcaaagttgcacatgtacgattgcctccgcgccaataaaagtttgtcagcatggggagtagaaggacgtgttcctttccttgataaagaattcctcgacgtagccatgaacctgaatccgaaagctaaaatgtgccccggaaaggaaattgagaaacggattgttcgcgaagcctttgccgagatgttaccggaaagtgtggcgtggagacaaaaagagcagttcagtgacggtgtaggatattcatggattgacacattgagggaaatcacagctgctgctgtgagcgatcagcaaatggaacatgctgccgaacgcttccctatcaacacgccacaaaataaagaagaatactattatcgcagtatctttgaagagcatttccccagtgaaagtgcagcacgcaccgtacccagtgttcccagtgtggcctgctccacagcagaagcgctggcgtgggatattgctttcaggaatctgaatgagcctagcggacgtgcggtgagaggaatacacgaagaggcctatacttaactgataagaataacagaatctgctctttctgttattcttttgtaacatttctattttaaaatctcaaggattaacgcagattagcatattattgtctgatttgcgttttcttttttataattttgaggccaaaccaaattaaatctatcaaacttttaaaagaccaaacaaatgaatttaaaaaaaatgatgatggcttctgcccttctaatggttgcttgctgtatgcaggcacagacaaaagtgatagcccaccgtggattctggaaaactccgggatcatcacaaaacagtatttcatcacttctaaaagcagattccatcggttgttacggttcagaatttgacgtatggatcgctaaggataacaagttggtggtcaaccatgatcctgtatacaagatgagaccgatggagtattccaaaggtgacgcactgaccggacttaaattatccaacggagaaaacttacccagcctggaacaatatctggaagccgggaaaaactgtaatacccgactgattctcgaactgaaagcacatagtaacaagaaacgtgaaaccaaagccgtacagggaatccttgccatggtgaagaaaatgggactggaaaaccgcatggaatatatcacgttctccctgcatgccatgaaagagtttatccgcctggctcctgccggtactccggtattttaccttaacggggaactgtctcccaaagaattaaaggaactcggtgctgccggtcttgattatcacatgggagtgattaagaaacaccccgaatggatcaaagaagctcatgaactcggcttgaaagtaaatgtgtggactgtggacgaagtggaagatatgaaatcgctgatcgaacagaaagtagatttcattaccaccaacgaaccagtcatcttacaagaagaactgaaaaaacatcaataagataaaatcattacaaagtaaactatttaatatccgtctttaaagaaacagctcgttcctttaaaagaaacaggatgtttctcggtgtcgaacgggtggtcccttttaaaggaaccacccgtttcttttaaaggaaaaatgagcttttataacaaactaaataccagcatattaagaacactcatttttttcatctgaaaaagaaaaggtcattttcatatatgccaataaaagattacaaacgatttactggaaatcatctaatacctctttcagctctcctaccgtaagctctcctacctgtctccataattcatgtcccttatgcaataaaagaaaggcgggcactgtttctacattatgcgcatcggctattgttctattttcttcagcattcactctaatcaattctacagttctcttttcgtaagtccgaagcacaggacctatccactcataatgaggtgaccagtcggcataaaatactaccaacaccaaatggttggtcttaactgctgtttctaattgtttctctatattcatatctctacgtttttatattaatgatagtgctaaaacaatgaatacagaaaaaggttcttcagcatatccggtgagcaatatgatagataaataggggttttcactttcatatcgtcaaaaggaaaaggatatatttcttgtttttatagctgatttcaccgattatcaaggctaaatattcttcatatattatggaagaatatgcaaaacaattcatccaaataacagtttattaatatataaataggtataatttcaaattataactaaatgtggccgtatataaagcgattataagtttgaagaaaataaatagatattagatatactttttagtaaaatataaagcaaaaagtcatatctttgcatcataataaaacaaaaggttacaacaatcaacaaatataaatcaaaatgacaacaaagattaagttcacaaaaatgcatggagcgggaaatgactacatatatgtagacacaagccaatatccgatagccgaccctgcaaagaaggcaatcgaatggagcaagtttcatacaggaatcggaagtgatggacttatattgattggtgtctctgataaagcggatttcagcatgcgcattttcaatgcggacggttcggaagctatgatgtgtggtaacggaagccgttgtgtaggcaaatatgtatatgaatacggcttgactgacaaaacagaaattacgctggatacacgatcaggaataaaaatcctgaaactgcatgtagagggaaaaacagttagtgcagtcaccgtagacatgggtagcccgttggaaacagaagagattcagtggggaggaaagtatcctttccggtcaaccaaagtatcaatgggtaatccgcatctcgtcacatttgttgaggacatcacccggattaatttaccggaaatcggtcctgaactggagaatcatcctctttttcccgacagaaccaatgtggagtttgcacagattgtcagcaaagacaccatacggatgagggtgtgggaaagaggatcgggaatcactcaagcttgcgggacaggtgcttgcgccacagcagtagccgccttcatcaacggacttacaggaagaaaaagcgatgtaatcatggatggagggacagtcaccattgaatgggatgaaatctccgggcatatattaatgaccggaccggcaaccaaagttttcgatggggagattgaggataagtattaaaaaagtattaagtatcaggtattgagtattagattttgcagaacttaaaacaataacaagatggcattagtaaacgaacattttttgaagttaccgggaagctatttattctcggacatagcgaaaaaggtaaataccttcaagataacacatcctaaacaggatattatccggttgggtatcggtgatgtcacccaaccgcttccgaaagcgtgtatcgaagccatgcacaaagcggtagaagagctggccagcaaggatacattccgcggatatggtcctgaacagggatatgattttctgattgaagcaattataaaaaatgactttattccacgtgggattcacttctcggcgtccgagatatttgtcagtgacggtgccaaaagcgataccggaaatataggcgatattcttcgccatgacaatagcgtaggtgttacagatcccatctatccggtttatatagacagcaatgtcatgtgcggacgcgccggagtgttggaagaagagacgggcaaatggagtaatgttacttatatgccttgcacaagtgagaacaactttattccggaaattccagacaaacggatagacattgtttatctctgctatccgaacaacccgacaggaacaaccttaaccaaaccggaactgaagaaatgggtggactatgccttggcaaacgatacattgattctgttcgatgccgcttatgaagcatatatccaagacgagaatgtcccccactctatctatgagattaagggagctaaaaagtgtgcgatcgaattccgtagtttttcaaaaacggcaggatttaccggagtacgctgcggatataccgtggttccgaaagaactcaccgccgccactctggaaggcgaccgcataccgctcaacagattgtggaaccgccgccagtgcaccaagttcaacggtacttcttacattacccaacgggctgcagaagccgtttacagtgcagaaggcaaaatacagattaaagaaacaatcgactattatatgaccaacgcccaaattatgaaagagggattggaagccgcaggactgaaagtgtatggaggagtcaacgctccctacttatgggtgaaaactccgaacgggctttcgtcatggcgattcttcgaacagatgttgtatgaagccaatgtggtcggtacccccggtgtaggcttcggaccaagcggtgaaggatatatccggctaactgcatttggtgaacgcaacgactgtatcgaagcgatgagaagaataaaaaactggctataagaattttgaataacttctcctagtctattcataaccagtggtttttcaatttacttgatagtatttcgcgcgctactatatatacatggaccgtacatccacatttttctaactattaaaggtaaaaagacgatgaaaacgacgattaacaaaaaaatgagggtaataacagtagcattattactgtcagggcttgtcccgtctacaatgatggcacaagataaggtagaagcttccgttggagcagatctggtaagtggttacatctggcgcggccaggatttaggcggagtgagcgttcaaccctcactggaaatctcttacaaaggtttctcactcggagcatggggatcggtaggattcgaatcgacggacacaaaagagttcgatttaactcttggttattcgataggcggttttagcgtttcagtgacggattattggtttaatacccaagtagaaactggcatagacgatgatggagaaacgatctttgcaactaacaagtattttaaatacggagctcattcaacggctcatgtatttgaagcacaagtcggatatgacttcggaccactggcagtcaactggtatacaaattttgcaggtgccgacggcgtgaaagaaaatggcaaaagggcttattcttcttacctcgcacttagcgcaccattcaaattgggaggtctcgactggacagtagatttaggtatggttccttgggagacaactttctacaatggctatacaagtgggttctgcgtatcagacgtaagtctcggagcttccaaggatatcaaaatcacagattccttctccgttccggcatttgccaaggtatctgtcaatccacggacagaaggagcctacttcgcattcggattaagtttttaagagagagaatatagaatatcaaagagcgtatagggatcaggtagttagagtttagattttatcggtttgttgtatggtaacctactatggctgccacaccctatacctctttcttttacaggtcaacactaatatttaaggtatatgaaaaagattgaagctattatccgtaaaaccaaattcgaggacgtaaaagacgccctactcgaagcggacatcgaatggttctcttattacgatgtaagaggtattggaaaagcacggcaaggacgtatctaccgtggcgtagtatatgacaccagcaccattgaacgaattttgatctctattgtcgtacgcgacaaaaataccgagaaaacagtgcaggctatcatcaaagctgcacagaccggagaaatcggtgacggacgtattttcgtcattcctatcgaagacgctatccggatacgcactgccgaacgtggtgacatagccctctacaatgcagaacaagaacgttaatcggcagcggcaaggtgccgctcccaggtttccttgcggattataacgtttataaagaggtttacaacatcactaataaataataggtataaaataagataattattatggatacaaaatataaaagccatagcttcgtaaagttgtggatagccactactatattcattttgtgctgttttactactgatatgtcggcacaaaacgcagccgctgccgatacagttgcagcagttacagaaacaattaccgaagtcgttgcagctcctgccgaagaagcatcagcagctcccgatacggttggtgaattagctcttggattaaatactgtatggatgttgcttgcagcaatgctcgtattcttcatgcagccgggatttgcattagtagaagcaggttttaccagagtgaaaaatactgccaacattctgatgaagaactttgtagacttcatgttcggctctttactatactggtttatcggtttcggattgatgttcggcgcaggcggattcatcggaatgcctcacttctgcgacctttctttcattaataatggtttgccaaccgaaggattcctcatattccaaaccgtattctgtgcgacagcagctacaattgtatcaggagccatggcagaacgaacaaaattctccatgtatatagtctacaccatctttatcagtgtactgatttatccgatatccggtcactggacatggggcggaggctggctgatgaacggtgaagaaggttctttcatgatgagtcacttcggcactacattccatgactttgccggttctacagtcgttcactctgtaggtggatggattgctttggtaggtgctgccattcttggtccccgtatcggtaaatatggtaaagacggcaaatcaaaagctatcccaggccatagcctgactattgctgcactgggggtattcattctttggttcggatggttcggattcaaccccggttctcaattggcagcagcaaccgaagccgacgcaatcgctatttcccacgtattcctgacaacgaacctggctgcttgtgccggtggtttctttgctctgttggtgagctggatgaaatatggaaaaccatccctgtcattgacactgaatggtatcttggcaggtctggtaggtatcacagcaggatgtgacgcagtatctcccgcaggagcagccttgataggtgcgatatgtggtgtcgtaatgatattctccgttgacttcattgacaaggttttaaagatagacgatccggtaggtgcatcttccgtacatggtgtgtgtggttttttaggaacgattctcacaggtttgttctctaccagtgaaggtttattctatggatacggtttcggattcctcggtgcacaactattcggagcattggtagtaagtgcatgggcagcaggcatgggattcatcattttcaaaacgcttgataagattcacggacttcgcgttccggcacgtgtcgaagaagaaggtcttgacatttacgaacacggtgaatctgcttacaactaagttacttataattaaaagtaagtctactcatcagtaagtgaattaggctatatagattaaaaagatttatcccgggcgggcctgaccgccttcccgggaaccacacagagaaaattatttgctctaacatatttaacaacaaatcaaattaggtattatgtcaaaacttagattcagagtagtagagacagctttcaagaaaaaggctgttgaggtagcaacacctgccgaacgtccttcggaatacttcggcaagtatgtattcaacaaggaaaagatgttcaaataccttcccagtaaggtatacaatgcactgattgatgcaattgacaacggtgctccgctagatcgcagcattgccgacgaggtagctgccggcatgaaaaaatgggctatcgaaatgggtgtcactcattacacgcactggtttgcaccgctgaccgagggtacggcagaaaagcacgatgccttcgttgaacatgacggcaaaggtggtatgatggaagaatttacaggtaaactgctcgtacagcaggagccggatgcttcttctttcccgaatggcggtatccgtaatacattcgaagctcgcggatacagcgcatgggacccctcgtcacctgctttcatcgtggatgatacactttgcatcccgactgtatttatcgcatataccggtgaagctcttgactataaagctcccttactgaaggcattgcgtgctgtagataaagcagccgtagccgtatgtcagtattttaatccggaagtgaaaaaagtagttgcttacttaggatgggaacaggaatacttcctggtagacgaaggattgtatgccgcacgtccggacttactaatgaccggtcgtactttgatgggacatgacagtgccaaaaaccaacagttggaggatcactacttcggtgctatccccacccgcgtagccgctttcatgaaggaccttgaaattgaagcgttaaaattaggtattcctgttaagactcgtcacaacgaggttgccccgaaccagttcgagttggctcctatctttgaagagtgtaaccttgctaatgaccataacttactgattatgtcattaatgcgtaaggtaagccgccgtcatggtttccgtgtactgcttcatgaaaagccgttcaaaggtgtcaatggttcgggtaaacacaacaactggtctttgggcactgatacaggtatcttattgatgggaccgggcaagactccggaagacaatctgcgttttgttacattcgttgtcaatacattgatggcagtttatcatcataacggactactgaaagcttctatctccagtgctaccaatgcccaccgtctgggagcgaatgaggcacctcctgcaattatctcctctttccttggaaaacagttgtcgcaggtattggatcatatcgaaaacagtacgaaagatgatttaatcagccttagcggtaaacagggaatgaagttggatattccgcagattcctgaattactgatcgataatacagaccgtaaccgtacttctccatttgctttcacaggcaaccgctttgagttccgtgccgtaggttccgaagcaaactgtgcttctgccatgattgcattgaactcggccgtagcaaatcaattggtgaagtttaaaaaggacgtggatgcgttgattgaaaagggagaacccaaagtttccgccattcttgaaatcatccgcggatatatcaaagaatgtaaagccattcatttcgacggtaacggttacagtgacgaatggaagaaagaagctgcccgtcgtggactggattgcgaaaccagtgttcctgttatcttcgacaattacctgaaaccggaaacaattgccatgttcgaagctaccggtgtaatgaccaagaaagaactggaagcccgtaacgaggtgaaatgggaaacttatacgaagaagattcagattgaggcacgtgtattgggtgacttggcaatgaatcatatcattccggttgccactcaataccagacggacttaattaataatgtctataagatgcaatctcttttcccagcagaaaaggcagcgaaattgtctgctaagaacctggagcttattgaagagattgccgaccgtacagctttcatcaaggagcatgtagatgcaatgattgaggctcgtaaggttgcaaacaagatagaaagcgaacgggaaaaagccattgcctaccacgacacgattgtcccggcactggaagaaatccgttatcacatcgacaagttggaactgattgttgacaatcagatgtggacgcttccaaaatacagggaactgttatttgtgagatagaaaaaaatacggtgaacgataaacagtaaacggtgaacaaactgcattatcattgcagaatattcaccgttagccgttcactgttattgaaattatctatttcttttgttggttgttttaagtttgcggggaggggtgctgtgaagcagtcctcttctttttttattcgataatctttgcgtcttcaatatcatcatcgtcatgcataaccggagccttcgggcggcgacgggcaaacttgaaccagtttatcaattcggaaagagaataaaccaaactgctgataccaataattataaatgcagtattacgcgctcctgtcggattgaacaaagcgataatacccgcaataagaatcagcgaaggaatcagataaaaagctcccggaacgggcatccaccgacgagccatcgacaaagaagcaatctgttgcactcctcccataatcaggataaatcccaataaaaacatcaggacatctgcaaagaattcaggcatcacaatcaaccaaagtccgaataataagctaccgattccttctatcggaaaacggggagctgcttcaccttccggtcttttccggccgaaatagccaaaaaggctgataacaccgggaatcaagaaggcaacacctaccgtaatgacaatataactggcagccgcattgggccaaatcacgagtaccaatccaatcacaagtgcgaagagaatgcgaataagggaataattcattgttttcataaattctatattttttaaccgagtctgttccaatacttttgcgaatataagtgtttctactgatatataaaaataacaaataaacattgtaataagttcgtaataatatcgttatgacgattacatctcacattgatatttttgcagaaattttaaacagttcctttttcacaatgaaacaaagcgaaataaaaaagaaatacccttatgtagagcgtgacatcagttggatgtacttcaaccaacgtattctgctagaagccgcccgtccagaagtgccactgctggaacgactcacttttcttggcatctattcaaataacctggatgaattcttccgtgttcgtgtagcgactctgaaccggatcgtagaatatgccgataaaaacatacaagcagaacaagaaaccgccgcctgcactctgaaacaaataggaaagctgcacaatcgttactacaagcagtttgaggagatattcgcttccattatggaggaattgaagaaagagaatatctacgtcatcaaagatgcggaaatgacggacgaacagaaagcattcgtcacttctttctatcgcaacaaactgaatggttctaccaatccgcttttcctcaatggaacccgcccgctggacgatcagacagatgaggatatttaccttgccatccgtctgctgcgcaaagatgaaacgggaaagataaaggagaaagactatgcagtgattgaactgccgaccggagacttcggccgttttattcaattacctgattcggatggaaaaacatatctcatgtttcttgatgacgtgatccgctattgtttgccgatgatttttgttggcatgaagtacacagattatgaggcgtacactttcaaattcactaaagacgccgaaatggaaattgacagtgatctgcggacaggggtacttcagaagatttccaaaggtgtgaaaagccggaagaaaggggaaccgatccgtttcgtctatgacgaacaaattcctaaagacttgctgaaaaagttgaccggccgcctgaacgtggataagaatgacacgcgtgtagccggaggacgctatcacaatttcaaggatttgatgaaatttccggtttgcggtcatcatgaactgaaatatcctgtttgggaacctatcttcaagcctgaactgaatggcatggaaagtctgctcactttgattcgtcggaaagatcgttccttacattatccttatcatagtttcgatactttcatccgtgtgttgcgagaagccgctatcagtaaagaagtaaaaagtatcaagatgacgctttatcgtttggctaaagactccaaagtgataaaggctttaatcagtgcagccaaaaacggaaaaaaagtcacagtagttatcgaactgttggcacgttttgatgaagcgtctaatatcaactggagcaagaaaatgcaggatgcggggattcatgttattttcggagtagagggtttgaaaattcattctaaattgctgcatatcggcactcggcacggagatatcgcctgcatcagtacaggaaatttccatgaaggaaatgcacgtatgtatactgactataccattatgactgctcaccgtcccattgtccgggaagtcaatgccgtattcgattttatcgaaaagccttatactcctgttgatttcaaagaattgctcgtttctcccaatgatatgcgtaaacgattcattgcgcttatcaacaaagagataaaaaataaggaacagggaaaagaggcttatatccttgctaaagtaaatcatattactgaccgtgcacttgttgaaaagctatacgaagcctcaacagcgggtgttcaagtggaactggtagtacgcggtaactgttctttagtgacaggcgttccgggtatcagcgagaatatacacatcaatggtattatcgaccgttatctcgaacattcgcgcattttcatcttcgccaatggtggagaagaaaaatactacattggttctgccgactggatgcctcgcaacctggataatcgtattgaggtggcggcaccggtctatgataaagaaatccaggcagatttaaaacgaattgtctgctacggattccgggatacggcaaaaggaagaattgtggatggtacaggcgagaaccgggaaaaagaacgggaagagaacagtgtcccattccgctcacaagaaaaattatataacgaatacaagaatacattatgataagtatgaagaaagttaattatgcggcaatagatataggctctaatgcggtgcggctgctgataaaatgtgtaaacgaggagaatgcgcccgaattaatgagtaaggtacagctcatccgtattccgttacggttgggagaagacgcctttactgtgggggttatctctacagaaaaagagaagaaactgattcggctgatgaaagcctacaaacaattaatgaagatatatgatgtggtagactatcgtgcgtgtgccacctctgccatgcgtgatgcacgtaatggcaaggatatcgttcagcagatcgtcaaaaaaacgggtatccgtgtagaaatcatcgacgggcaggaagaggcgcatattgtttacgacaatcatatcgaacagttatttgcttcaggacaaaattacttgtatgtagatgtaggaggtggtagtacggaaattaatctcatcagcaacggtgaactgaaaaattcccgttcatataatataggtacggtacgtatgcttagcggtatggtaaaggaagaagaaaaggaagctttgcgcactgacctgatagggcttgccacagaatatacccctatcagcatcatcggttcgggaggaaatattaataagttatttcgtttagcggacaagaaagacaaaaaagcgtctctcctacccatcgaatcactgcaagatatatatgaaacattaaaagccctctctaccgaacaacgtattaagcaatataagttgaaaccggaccgggccgatgttattgttcctgctgcagagatatttctcgagatagctactcatgtaaaagctaccggaattattgtacctaccatcggactgtccgacggtattatagacagcttgtacacgcaaaacatgaacaggcctgattctccgcaatctcgatgaatgaatatataaaaaactcctgatactaagtctggatatactagtatcgggagtttttgtctcatcttgctataatgtatagattcatctttaaaagagttaggtattcggattttgttctttatatttgtgcaactatatatttgaaacaatatggatataaaacttagaattgagcaatcttcggattatcatgaaaccgaaaacattacacgggaagcattctggaatcattattctccgggatgtgacgaacattacctccttcatattatgcgtaaccatcctaagtttgtgccggagctcgatattgttgcagaacataataacaagattgtcggtaatgttgtctgcctcaaatcatttatcatggcagatgacggtaaccaatatgaggttttgagcctggggcccatttctgtcctccccgaataccaacagcaaggtatcggaggaagaatgattgcacttaccaaaaaattagcttccgaaatgggatttcgtgctattttactttgtggtgacccggattattatctccgacaaggattcattcctgccgaaacattagggattcgcactgaagataatatgtatgctactgctcttcatgtttgtgaattatatgataatgctttagccaatgtaaaaggccgttatatagaagataaaatatatcagattgataaatctgctgctaatgagttcgacaagcgatttcctccaaaagaaattgtagttggtactccgtcacaaaaacggtttaatcagatagtagtgatgcagaaaaaagcgaattaaggttgaataacctaaatcgcctgatttgtacatctctggagctcggtcctgctatgatattaagcaactatcattcaatatagttaccattcttcgtatctttgcagttacaaaacattcaacatgagaaatttgaatttacaaaaagatactactgacactttgtaattcttaatctatcagggatcgcttctttcctccctttggctgaagtaaaatttttctgccactgtagagggctttattcaattcactattctacaattaagcatgatatatatacattttaatacgcgcacagcatttctacaatcaaacgggcatcacatgtactaataaagttcccttttacttttttctttttaccattatcaaagccccaaatagaaaaatcaatggaaagaaagtaggaaattctaacaacatttacgatatagcgacactatcccaatggtttgtttacttcatccatagcttttgatgacattatccgcatcttttacttactttatccttatgttttttacaaatatagcggcgcttttgatgtaaatatgcggtgctttacgcaataaaggcattgtttttcaataaatcatgggaattttcctgctaatagagaagaatgatagaacatgagagatagcaaaacccttgattacacgaacaatcgtcagaataatcagagattctaaaactttatgtatttactttgtcatcgaatgggtaattacataaaaaaggggagcattaaggcagcacttacttcctacaatctccccataatcaatgcacacaagttcttttcgaataaaactgtttgcaatatttctctttaatagttttagtactgaatcactttatcactactaactgtcttataccaatcagtagttgagctctgatcgtgtgcccaatctgcaaatttagaatatgcgttcgttatcactgttgtttctgttggataagcaaatttatcaggaacacacaaagcccatgtattattaactgccttgattacctcaagcacctcattatccgccaattgtccattcgccgtagccgaattaaaatgagtcaaatggatttctgttctcttttgacctatcccctgataagcaatgaagaagtctaaaccatctgtcacactagggacggatatttcatttttaagtttgacgttcacttcaagagtatatatatctgtaagaggagtgctagcattcccagtattcaacatggggcgttgtgctcctgtatatccatatacataatgtgcgtctccaaataaaggaatcacaagttcattgccattggcttcataagatgcattttcaaatataccagaatttaatgagccggtacgttgagcagcgcctgcaccaaaacttatctcttccacattatttttgtctattcctcgtattctcaaaccagcacctaattgtttcacggcaccaactgcccgaaggtcaattttatattttagttctttcacatcattaccggctgcaggcaaagttacattcaacacaatatcattgaaatcgtaatctcctgctttcggatagttatcttcgaaagcataagaataaactgcatatcgaatttctacatcatccggtttttcatcagagttatacccttctttaacacagtcaccgtcagcaggaagtataaattctgctttgcccggattacaataggtagcaccttgctgtaatcccttatttactagccatgcaaaaggagaccagttataatgtgcttcgcctttatatgtttgatctgttatttcacaaatgatattattacttactttagaagcagattgagccagaccggaagtattatctatttcgtgaattcttaataaggcagttccttgtgtcggaccggtaactgttctgaataaattagctttgcccgtacaagtcaacatggattgtgcttccatcacgatattattatcatttccattacccgtcaattctttgcaaatagcttcggaagtatttcccataacaagcgtaccaaattgtaattttccagctttcagataacaaccgtttttaatattagtattattgttgccatctatattttcgacttcaatggttccatgatttatcaatgtcgtaccatttgtagaagcattataagaattcagtttaagtgttccataattcacaaaatcaactccgtttccacttccatcaattttcaaaaagtcacaatcaatcgtacccgcattatagtttgtacgcccagccgaactatttgttatctgaatacctctgtcaccaacaatacttcctccctgcatcacagttatataagaagcccgcgttaatatcagactcccatttttagcaatctctatctttccaccattctcaacgataatttctgtaatatcagaaaattgattactattctctataacccatgtgcttccttgaggaacgattactttcacagcacttatttctccatctctatttccagttgcactaaatccagctttaaaagttccttcctgaatcttaaaccaacgctcactttctgtaaaaacaggaaattgaccataacttccaccccagccagactttgcagaaagatcccaattagcctgaatgacagtagaaattgcctttttagcactaataaaatcggctgtataaggagcttccatgactggtatactagtcgtcacagctcgtgatatagaacgtgttggcgtacctttgtctccaaagtgcgctgtcactgtaccattttcaatcgctgtcggttggaccagataacgtttgtgttcatctatacgcgcaacaaacactttatcaagagatgttgcgcaatccatcaccacatccaaagtcatactttgagtgacagttccttccgctaagagttttgctgtactttccgggcttaatggatcggcatcaaatatctgtatcttataatctactccttgatccccattgattgacacatgtgccgttacacttcgtgacattgtccaatcaccatcagagtcgatgttttttacaggaaaagtttcttcgtaaatttgtttcagttgatctgcattaaacagatttttctcattatcaacgcaactaataaaactgatagaagatactaacaacgaaaaagtgaagatttttacaatgctttgtttcataatctttaaatacttaagtttgctttatttgcacaaaaaataaaaatcattacgaatcaacaatcagcaatgaatgtacaaagatagttgtatttacaaataagaaacggataaagttgtatttttcgacctacggttaacatcttttaaaagataaggctttaattactcccaataaaaaacgacctattacattattgaatattaaaagcttagaagtacaaatatgcaatatgcaatcaaaaaaaagagttgcagattctatgcaactctcaattaaacgacaaagatccagtgttacaaagcactacaactacaaaataccgagctctttcatctccttattaaaaggataaaaattaaaaactaaaaggggaaaatcaatggtaatacaaaaatcatcacgattcccataataatctgcaacggcaatcctacttttacataatccataaaagtatattgaccggcaggcatcaccagggcgttaggcggtgtagagaatggagaagcgaaacacatacttgcacctaccgtcacagcaaacaagaagggaaccggacttaccccgatctgtatggcactttgcagagcaatcggtgcgagtaagacagccgtagctgtattgctgataaacatcgtcatcaacgaagtcgtaaagtaaatacctgccatcaacgcaacaggtccgtatgatcccaagccgttaaccagcgtattggaaatgtattccgaagctcccgttttctccaatgccagagacataggaagcatagctgcaatcaatacaatactctcccagttaatcgttttataagccgcttctacattgcggaaacatcccgtgagcaccatcaatatacccgctatcataacagctgtaaccggagcaaccggaatgaagtcaaaaaccatcattgccaccattaacaccataatagcagctgccaccggagctttatagtctaacgtaactttagccgcttccgccaaaggttgtcccaaaacaacccaatcagaatcctctttgctaagacgggctatattattccatgttccttgcaccaaaagcacgtcaccactatgaatacgctcatttcccaaatcctgcaacaagtattcctttttacgacggattcctaatacgttcacattaaacttatcacgaaaaccggcttccttaattgtttgatttatcaaattagaagctggcatcaacactatttcagcaataccgatgtcataaaaatccagagagttagttgcgctttgagtttcttccgttgcatggtcacctaaaatctctagcaggaaatcttctgcaaaaagctgtaccttatcaaattctcctgtcacatacaaaatatcctcggcttgcaacatcgtgtccggtgcagcaaacttctgggtaatcgttttcagaaaacgatgttgcgatgcatcaccacgacgcacttccatgatattcaaaccatatttgcgacgaatatccaagtcaataatcgtcttgcccaaaagccgggaaccttttattacctgcaaacgaaacagattgctggaaagcccatattcatttaccaactgtttcagtgacttacccgaacgtttattatcatctttctggccttttttagaaagaaaccatttgctaagtggtatcaataccagcgtaccgacaatcacacagacaatgccgacaggcaggaaagagaagaaggaaagcggttcaagtccggcagaagtcaacgtattttgtatcacaaggttcggcggagtaccgattaaagtcatcatacctcccatactacttgcaaaagccaacggcatcaacagcctgctcggattcataccggcactcattgccagactgacaacaataggaagcatcagtgccaccgttcctgtgttactgacaaacgcaccaatggccgaagtcaccaacatcaccaacagaaataaccggatctcactggttcccgcaagtttaagaatacgggaactaatcatctttgccaatcccgtttgaaagatagcccctcccactacaaacaatccgatcatcataatgactaccgaattggaaaaaccggaaagtgcttcatcaggagttaatatctgaaaaataagtaaggctatcagtgcacacagtgccacaatatccgaacgaaccttgccgttcacgaaaaagacagccgaaagaacgagaataataatggttattagcatacgtaattaaatgattgttttattttgactctatcaaaacttatttaggtgaacaaaaatagaaaatactccagcgttattaaaacaaactagaaatgattttagttcatgagacatcatttaatattttaatacattttctttctgaaaaaagactcgaaatcaagcaaaatatgataccatacaagaactacaagacaccatacctccactatttcttcatcgcatataattacagtctcacaatataatgttgaaagacaatatatttatgtattattttttgaaagttaaagaacaattcatatctttacacctcatttatatcaaacattttatggcaaacaattatttgttaaattattggattaacgaagttcattggggttataattatttactagtagttattttgctccttgtcatcagcatcttactatatagaatccgaaaattgcaaaaaacgattaaaaagaccaatcattcctaccgtttctcctttgatattctcgataaccttcctttccccatctttgtaaaagatattacaaacgatttccgatactattactggaataaagaatcagccgctcaatccggcattagcagtgaagaggccatcggacatactgattatgaaatttacggagaagaaagaggtgaaaaataccggcatatcgacaaagaactcatacaagcaggcaaagtatatcgcaaagaagagaaatacaccactcccgatggaatcacccatgatactattgccgttaaatctattatttcatgggaaggagaaaagaaatggctgttggcaacccggtgggatatcacacaactcaagaattatgaaagagaattagttgccgccaaggaagaactggaaaaagcattgaagaagcaaaaactagctctaaaaagtatcgacttcggccttatctatattgataaaaattaccgggtacaatgggaggaaacaagacaaatagccagcctggtaaaaggcagacgatacataccgggaaaaatttgctatcagaccagtgcacttcgtaatgaaccgtgtggacaatgtgctttcaagaaagctatcgaacagggcaaaattatccggcataccatcagagtagacgatgtagattttgaagtgaccgcaacacctgtattcggcgatgaaaaggaaattgaaattattggaggattacttcgttttgaaaacatcactgaaaaattaaagatggacaaaatgctgcaggaagcaaaggaaaaagccgaagaatccaatcggctcaaatctgcctttctcgctaatatgagccatgaaatacgaaccccgctaaatgcgattgtaggattctccgaaatggtttgccaaacggaggaagaggaagagagaaaagaatttgtaaaaatcatctccagcaacaatatcttattattgcaactaatagacgacatcctcgatctttctaaaattgaagccggtactatggaattcacatttgcacagactgatatcaacgaattgatggaaggtatttgcagacaaatgcaagaaaagaattcttccccaaacattcaaatcttattcacagagaaagcagatcaatgcatgatgtataccgaccgcatacgtctatcacaggttatcatcaactttacaaataatgctttgaaattcacccctaaaggttctatcgaaatgggataccggattgaagaagccaaagatgaaatatacttttatgtaaaagatacaggtatcggaattcctgctgacaagatagataaagtgtttgaacgcttcgtcaaactgaactcctttattaaagggacaggactcggactagccatctgccgtgtcatagtagaaagactgggcggggttatcggagtggaatctaaagaaggagaaggctctcgcttctggttcagaattccaaggtcagagaaaattgagaaataataaaaagaaaagaggatattgtgaaaagtatgttccaatatcctctttatcctatatttttaatgtaagagtatacttaaagtgcagtctctaatatcctgcgggcaacagcacccgttacatttccattctctccatatttagcaccacgttcattgaatcggcgttcgatttccagaatagtatcctgtccgatgttctcttcatgcaaacgtgtagtcagcccaagcgaacgaaagaactcttcggtatgacaaatcgcttcatcaatccgttcttctcgcgtaccggaagtaattccccagactctttcaccatactgcaaaagtttatctcctttttcttcatgaagcacctgtaaagtggcaggaagaacaatggctaacgtatgaccatgtgtcaatccgtgcaaagcagtaatttcatgaccaatcatgtgagttgcccagtcttgcgacactcccatagcaataaatccattcaatgccattgtagccgaaagcataaaatcagccatcagttgataatcatgctggttttcacggattttcggagctatttctaccaaagtttgtaaaatgccttccgcccaacgatccataatgcggctctgcccgggagtagtcatatattgctccatcacatgaacaaaggtatcagccaaaccacaggccacctgatgaggaggcaaggtaaaagttacttccgggtcaagaatagagaagattggatagttagcataaaaaggatatttctcttttgtttcacgacgggaaataactgccccgttattcatctccgaaccggtagcgggcaaagtcaatacagtggcaagaggtacagtatgagtgactggacgtccggcaagtactaaatcccaggcatcaccatcatacaggattcctgcggaaatcaatttcgtaccgtcaataacggaaccaccaccaacagccagcagataatctactttctcttcttttcccaaagcaatagctttacggagagtttcaatggcaggattgggttcgattccccagaattctactgtaaaatgattcttcaatgcttcctttacctgatcgtacactccgtttttcttcacgcttccaccgccaaaagtaatcataatacgcttgtcggacggtatttctttagccaaccgagcaatcatcccttttcccattatcagtttcacgggattttgaaaaataaaattttccatatcttagtctattgttattattttggttattagtcactatccttgcaaagatatatgatttatccgaaccctgtcagaatcaagcgaagaattgttgtgccacggaaggaaccatagccgacaaccagggtttcatatcctctgctaccaataaccaatacaataataatataatgaaaatggcaatagcgatacctactaaaacttttctctgtttcataattgtttttgtttaaatattcaatatttataagaacagttcaggttgaaaattgttctatatcagaaaaatgaaggcaaaagagaaaaaaagtcattttttgtttgctgtttcaaacaaagtgtctatatttgccctcataaaattacaaaagacaatgagaacaatgttagtaaatacatattggtggtggcacccgttacaactccgacagtcgtaagggagcagtgctcgtatgtatatacctcattaaagatataacagatttgaaagagccctgtcgcaacttgcggcagggctctttttatttgcccattttcgaacagatttagataataacataaaaaatagataggattatgaaaagttttttagttgaccaggatggctattacggagaattcggtggtgcttatgtaccggaaatcctccacaaatgtgttgaggaactgacgaacaagtacctcgaagtgattgaaagcgaagaatttaaaaaggaatttgagcagttattacgcgactacgtaggacgtccttccccactctatctggcaaaacgcctttccgaaaagtatggttgcaagttgtatctgaaacgggaagacctgaatcataccggtgcacacaaaatcaacaacaccatcggacaaatcttgctggcacgccgcatgggaaagaaacgcatcatcgccgaaaccggagccggacaacatggagtagcaacagctaccgtatgtgcgttgatggatatggaatgtatcgtttatatgggaaagacggatgtagaacgccaacatatcaatgtggagaaaatgaaaatgctgggagctaccgttattcccgttacttccggaaacatgaccttgaaagacgcaaccaacgaagcgatccgcgactggtgttgccatcctgccgacacttattatattatcggctctaccgtaggccctcatccttatcctgatatggtggcacgcctgcaatctgttatcagcgaagaaataaaaaaacaactgcaagaaaaagaaggacgtgactatccggattatctgatagcctgcgttggaggaggaagtaatgctgccggaacgatttatcattatatcaatgatgaacgggtaggcatcattctggcggaagccggaggtaaaggaatagaaaccggaatgaccgccgccaccatccaactcggtaaaatgggaattatccacggagcgcgtacttacgtcatccaaaacgaagacggacagattgaagagccttactcgatttccgccggactggattatccgggcattggtccgatacacgccaatcttgccgcacaaagacgtgccaacgttttggcaatcaatgacgacgaagcaatagaagccgcttacgaactgactaaactcgaaggtattatccctgcactggaatccgcccatgcattaggagctttgagaaaattgaagttcaaaccggaagatatcgttgtattgactgtttcaggacgaggagacaaagatattgaaacctatttatcgtttaatgaacagcaataagtaattagtaaaccatcattcgtaatcaataatcaagcaattatagaaatgaaaacatttaattatacaactcatagcaaacaagtgctcggagatatgcatactcctgtcagcatttacctgaaagtgcgcgacatgtatccgcaatctgcattaatggaaagttccgactatcatgccggagaaaattccttgtcatttatagccctctgtcccctggcaagtatcggtataaacggcggcattgtcacttccaactatcccgataacagccgcacggaagaacccctgacaaaaaccttccatgtagaaaaggccatgaaccggtttatcaatcaattccaggtgaccggggataataagaatgtatgtggactttacggatacacgacgttcaacgctgtgaaatacttcgagcacatcccggtgaaagaaagtcacgatgagcaaaatgacgctccggatttgctatacatattatataagtatgtcattgttttcaatcatttcaaaaatgaattgacactcgttgaaatgttgtccgaaggagaagaaagcggcttaccggaactggaagcagccatcgaaaaccggaattatgcttcttacaacttctctgtaacaggtcccgttactagccctatcaccgacgaggagcataaagccaatgtccggaaaggaatcgcgcactgtatgcgtggagatgttttccaaatcgtactttccagaagatttatccaaccttatgccggagatgatttcaaagtgtaccgcgcactccgcagcatcaatccttctccttatcttttctacttcgatttcggaggataccgcatcttcggttcttcaccggaaacacattgcaaaatcgaagatggtcgtgcttacatcgatccgattgccggaactacccgccgtaccggagatgtagtaaaagaccgggaactgacagaagctttattggctgaccctaaagaaaatgcagagcatgtcatgctggttgatcttgccagaaacgacctttcccgtaattgtcatgatgtacgcgtactattctataaggaaccacaatattatagtcatgtcattcacctggtaagccgtgtcagcggtatgttgaatgagggcgcagataaaataaaaacgtttattgatacgtttcctgccggcacattaagcggtgctcccaaagtacgcgctatgcagttaatcagcgaaatcgaaccacataatcgtggagcctatggtggctgtatcggttttatcggattgaacggcgaattaaatcaggctatcactatccgtacttttgtaagccgcaacaatgaactctggttccaagccggaggaggtattgtagcacgcagtcaggatgaatatgaactgcaagaggtgaacaacaaactgggagcactgaaaaaggcgattgatttagctgtcaaattaaaaaattgaaagcagagatagtatttgaacaaccattttacaatgacaataaaaatgaaaatattacttttagataactacgactctttcacttataacctactgcacgcagtgaaagaattaggggctacagatgtagaagtagtccgcaacgaccagatagagcttgatgaagtagaccgatttgataaaatcatcctgtctcccggaccgggcatacccgaagaggccggactgctattacctattattaaaagatatgctccgaccaaaagcattctgggtgtctgcctcggtcatcaagccatcggcgaagctttcggagcacgtctggaaaatctcaaagaagtatatcatggggtacagactccgattaccatccttcaccaggatttgctttttgaagggttgggaaaagaaatccctgttggaagataccattcctgggtagtcagccgggaaggttttcccgattgcctggaaataacggcagaaagtcaggaaggacaaatcatggcaatccgccataagacctacaatgtacatggtattcagttccatcccgaatcagtattaactccgcaaggaaaagaaattattaaaaacttcttaaacgattaaacttatgaaacagattctatacaaacttttcgaacatcaatatctgggacgcgatgaggctcgcaccattttacagaacatcgcacaaggaaaatataatgatgtacaggtagcctctttaattaccgtctttctgatgcgtaatatctctgtggaagaattatgcggtttccgcgatgcattgcttgaaatgcgtattccggttgatttaagtgaatttgctccgatagatatcgtaggaaccggaggtgatggaaaaaatacatttaatatttctacagcttcctgttttactgttgccggagccggtttccccgttgtgaaacatggtaattacggagcaacatcagtcagcggtgccagtaatgtaatggagcaacacggtgtaaagttcaccagtgacgtcgatcaactgcgccgtagcatggagaaatgtaatcttgcctatctgcatgctcctttattcaatccggcattaaaggcagttgctccggttcgtaaaggattggcagtgcgcactttctttaatatgctcggtccgttggttaatccggtattaccggcctatcagcttttaggagtttacaacctcccgttacttcgcctctatacctatacttatcaggaaagcaagacgaaatttgccgttgttcatagtctcgacggatatgacgaaatctctctgacaaatgagtttaaagtggcgaccagcgatcatgaaaagatttacgctcccgagagtctcggattctcccgctataaggaaactgatctggatggtggacaaacaccggaagatgcagctaagattttcgaccagatcatgaataacacggctacggaagctcaaaaaaatgtagtggtagtcaattcagctttcgccatccatgtgatttgtccggagaagactattgaagaatgtattgctctctccaaagagtcattggaaagtggacacgcattagctaccctaaaaaaattcattgaattgaacagttaatgttttatttttgcaaatccatcatttacaattaataatcccacatcaatgaaagatatattatcagagattatagcaaacaaacgatttgaagttgacctgcaaaagcaggctatctccatcgagcaattacaggaaggtatcagcgaagttccgacctctcgttctatgaagcaggcattagcctcgtctgcatcgggtattatcgctgaattcaagcgtcggtctccatccaaaggatggataaaggaagaagcatgcccggaagaaattgttccctcctatgcagcagcaggagcttctgccctttccatcctcaccgacgagaaatttttcggaggaagcctgaaggacatccgcactgcacgtcctttggtagagatccccattcttaggaaggacttcatcattgacgaataccagctttatcaagccaaaattatcggtgccgatgccgtacttcttatcgcagccgcattagaaccggagaaatgtaatgaacttgcagaaaaagctcatgaactaggtctggaagttcttctggagattcatagctccgaggaatcaatatacatcgacaagaaaatagatatggtaggaatcaacaatcgtaatctgggtactttcttcactgatgtagaaaactctttccgcttggccggacagcttccccaagatgctgtattggtatccgaaagcggcatctccgatccggaaatagtaaaccgacttcgggcagccggattccgtggattcctgatcggtgaaacatttatgaaaacacagcaaccgggagaaactttacagaatttcctgcaagcaatccaataaactaattattcaaaacggacagccctatgattaacggaaaaattatcaaagtatgcggtatgcgtgaagctgaaaacatacaggacgtagagtctatcgaaggcatagatatgctgggattcatcttctatcctaaatctccccgatatgtctacgagcttccggcttacttgcccattcatgcccggcgtgtcggagttttcgtcaacgaagacaagcagacaatcagcatgtatgctgatcgtttcggactgaattatgtacagctccacggaaatgaatcaccggaatactgccggtccttacattccactggattgaaaatcatcaaggccttttcagtagaccgtcccaaagatttgagaaaggtatatgactacgaaaaagtctgtgatctttttctgttcgataccaaatgcgaacaatatggtggttcgggaaatcaattcgactggagcatcctggatatgtacaatggacatgtacccttcctattgagcggaggcattaactcatacagtgccaatgccctgaaagagtttaaacatccccggcttgccggatacgatctcaacagccgttttgaattgaaaccgggagaaaaggatccggagcgtatccggacatttttaaacgaattaaaatcataatctaaaaattccaacgtcatgaatagaattaatcaacttttcaatagcaacaagaaagacatactttctatttatttttgtgccggtactcctactttggatggtaccgctgatgtaatccgcacgctcgaaaagcacggagtgagtatgattgaagtcggcattcctttcagtgatccgatggcagatggcattgttattcagaatgccgctacgcaggcattgcgcaatggtatgtctctaaaacttctttttgaacaattacgggatattcgcaaggacgtaaaaatcccacttgtgcttatgggatatttaaacccaatcatgcaattcggatttgagaatttctgccgtaaatgtgtggaatgtggtatcgacggcgtcattattcctgatctccctttccgtgattaccaagaacattatcgtatcattgccgaacgctataacatcagagtgattatgctcatcacaccggaaaccagcgaagaacgggtacgcgagatagatacacataccgacggatttatttatatggtttcatcagcagcaaccaccggagcgcaacaagatttcaacgaacaaaaacgggcttacttcaaaaagattgaaggtatgcatctgaacaatccgttgatggtgggatttggtatctccaataaagcaacattccaagcagcttgcgaacacgcttccggagctatcatcggcagtaagttcgtcactctgctcgaagaagaaaaagacccggaaaaggcgattaccagactgaaagaagccctgaagtaagagcctcggatgaaaatctccgcaggccgcagggctatttccgcaaaccgtggggctatttctgcaagccgtggggaggctgtacttcacccgtgggacgagcagagacaagccgtgagctgaacaaaaacaagacgtggactgaacaggatcgaggcgtgggctgacaatctcgttgcccctgtcattcaccgaatccgaagtccgaacaacaacagcagcagtcttcctttcctcgccaatattgctgctgttgtttacaacagtagtaatatttctcttctactctactctcttgggtttcattcggtttttgccctttatccatcggcgtttcagagtttttttccactgcacttttttccactggtttttgtatactattaaccactgatttgctgtagtcattctttgcacacagatacagcaacaacacataaatccctacaagttgcactccccctatctgatacatcatgacgctcaaattgtcgcctgcccaaaaacagatttctaacggaaaataccggtcatttttcattttctctttcgttttttatttaaagccggacacttcgtccaacctgccccaaagatggggacattttttcatactacatatcgcaaaaatgcaacatagatattttttatagtcttgtccttccaactttatataattcgtcgtttagcactcattattcgcatttaatccgtatctttgccaatgttttaacagtaattcaacaattatgagagcagaaactccttccgttttgttaatttacacgggtgggactatcggaatgatagagaatccggaaacaggtgccttagaaaatttcaacttcgatcatttgcttaagcacgtccccgaactgaaaagattcaactaccgcatttcctcctaccaattcgatccccctctcgactcttcggacatggaacctgcttactgggcaaaactggtaaagatcatcaattacaattatgattatttcgatggtttcgtcatccttcacggaacagacacaatggcttacactgcctctgcactaagtttcatgctcgaaaatctaagcaaacctgtcatcctcacaggttcccagctcccgatcgggactttgcgcacagacggaaaggaaaacctcatcacagccatcgaaattgcagcagctaaaaatccggatggtacagccattgttccggaggtttgtattttctttgagaatcatttgatgcgtggcaaccgtaccaccaaaatcaatgcggagaatttcaatgctttccgctctttcaattatccgccattggcacgggtaggtatccacattaaatatgagcctaatctcattcgaaaaccagacccgacaaaaccgttaaagccgcattacctgtttgacaccaatgtagttattctaacgctttttccgggcattcaagagagtatcgtgacttctctgcttcatgttccgggattgaaagcggttgtcatgaaaaccttcggttcgggaaatgctccgcaaaaagaatggttcatccgccaactaaaggaagctaccgatcgtggaattatcattgtcaacattacacaatgtgcctccggagcagtagaaatgggacgttacgaaacaggaatgcatcttctggaagcaggtgtaatcagtggatatgacagtacccccgaatgtgccataacaaagctcatgtttttattgggacatggattacccaacaaggatatccgatataaaatgaactcctgcttaataggagaaatcaccaagtcttaagttaaatccatctattgtaaccccctgattttcattttaaacagttgtataaaagtgaaaatcaggggatttctcttcatcatcatcaagaccgaatcaaacctaaaagagccaaagaagaaccaaaacggaagtatagttgttttcactccataaaataacagaaaaaacatttccaataaaagatatgcagttatttttgtgatggatttggttacaaacaatcaagcaataatacattatgatgaagaaaacaattcaatttgtacccatcattgcaatagcgatggcaggtactatgtctagttgtgttgactctggaaaggatctctatgatccgtcttacgaaacacctaacccgatgggagatggctttgctgctcccgatgatatcgattggaacatgataaccactaaaaatgtctcggtcgaagtgaaagatgaagaaggaggactatttgcttatttagttgaaatatatgcagaagatcctttgactaatgaaagcgcttccgtgctcgctgcaaggacagctaataaagaaaacaactttaaatttacaaccgctgtcagtctgctgccaactcaaaagggtatttatgtgaagcaaaccgaccctagaggacgtgaacaggtatatcagttcgatgtgccggaaaacagtgataatattacctgtaaactctattatgcaggatctactgcacaaaatagagcgttgatgagtcgtgccgctgctacaagaggcctttcatttgaaaagccggattactattccatacctgctaatgcaaaagaagtgactgaaatgtcaggaaccactttgctgcgtgatgcttcttacaaaatcacctctgactatgccggcacattcaagtttgacggttatgacggtgaaattgcaaccaaagtttatgtagatgctaaatggacgattcccgcaacattccaattccaaaacggtattgaaatcattgtgatgaataatgctaaaattgaagcatcaggaaccatgacgttcattagaaactccatgttgaccattatggaaaagggagaagtgaatgcagaggatatatcattcaccaatggagcgcctgctgcattaagaaactggggtgcactgactgtagcgaacacaatgacactacattccggtgcaacactctacaacaaaggaaccataaccagcaagaatatctcaatcaattccaatacgaaaattgtaaatgacaataaaatcagtttggaaggagaattaaatctgccgtctaatttctctttggaaaataacggagagatttatggagagaaattaattgcaaattccgacgctgttgctaccaacaacaacatcatgaagtttacaaccatcagtctcaccaatacgactgtcaacaacgcttgtagcatggaagcaacgacttctttctatgccaacggagcgacgtttaactttactcaaggatatttgaaagctcctaaaatggagtttgttaatggaacagtaaatttaagtgatggttctatgctggatgctacgacaagtatcagcatacctcccggttatgccaagttttatggaaaaggcgaaaatacttctatgataaaatcaccggttatcaccggacaaggtttcacatatgatggaaatttggttattgaatgtgacagccacgttgaaaagaaccaatggtgggaaaacttccatgtactgaatggcgcatacttcaccaaaatgggagactctaaagtcatcatcgatgtttgtacaggaattaaaaatggtggaaatgaaggaggagatcctgaagatcctaagttcccgatcatcatggatgataatcgcaattatgcttatctgtttgaagaccaatggcctttatatggggattacgatatgaacgaccttgttctgattatcaaggaaagaaagatctccatcaataagagcaataaggcagaagagttcacgttaagtcttgatttatcggctgccggagctaccaagagtattggagctgctatcatgctggacggtgttcctgccagtgccattacgcagccggtggaattcagtgacaactctctttttaaaggtttcaatgtgaatagtaatctgattgagaacggacaggactatgcggttattccattatttgacgatgctcacaaagcattgggaagagaccgttacgaacagatcaatacgattgcaggtcactctgccaatacgagtcctaaaaatatcagtttcactataaagttcagcaatcctatctctgtggatgagcttaatatcaataaactgaatgttttcattttcgtagaaggaaacagaaaccagcgtaaggagattcatattgtcggttatcaaccaactaagttggcaaataccgacttgttcggaggcaacaacgacgatagttctacttcccgcaagagatattacatcagcaaagataacctggcatggggaatcatggttccgacagacttcaaatggcctttggaatatgtgaatatcaaatcagcttactcgttattcgaaagttgggtgaccagtggcggtactaagaatgaagaatggtggaaaacttttgattcatcaagagtatataaataagcctaacaattaatctttaacacggattccagtttttatggaatccgtgttttttcattaagatgctgtaagttgcaattaatagaaaaaaaagatatatcacgaattttactctcctgattggggattattctaaaataatatctatatttgcagtgtatcacaaatattatgtgacaacaatcttaatctataaatcaaataacaaagcaagcgatagaaaggtctattcgtatgaagaaaaaaatattactagtcgacgataaatcgacaatcggaaaagtggccggtgtgtatctaggaaaagagtatgattttacctatttggaagatcccatcaaagcaatagaatggcttaatgaaggcaatgtacctgacctcattatttcagacattcgtatgcctctcatgatgggggatgaattcttaagatacatgaagaacaatgaattattcaagtcaattcctatcgttatgttatccagtgaggaaagtacaacggaaagaatcagactattggaagagggagcagaagactatatcctgaaaccattcaaccctttggaactcaaaatccgaatcaaaaagattattgactaataccgggtcttctacacatgcaatattttgtttatataggcagagatagcaaaacaatagaactactctcccgactaagtattggggtattctatgctgcacccaattgtagcaaagctgtcaaagtattggagaaaatacgcgaaaaatatgacgcagctctatttttcgaacaagtgaacatatccaaagatattgcagatatccaatacatgcgtaaaaagtatccggggctttatatggtactcgttatcgactccttatctaaggaagaagcatccgaatatcttaaagccggtatcaacaatacgataaaatatgaaacaagccaggaggctttaaaagatttatcaactttccttaaacgaagaaaagatcagaaaataaaggcacttcaacttaaagcacaaaatataaatgctttccgcctgcctttatggaaaagaacttttgatattttcttttcaggaatggcgatattatgtctttctcctctcttaatatttactgcactagctatccggatagaaagtaagggtcctattatctacaaatccaagcgcgtagggagtaattatcagatattcgacttcctcaaattccgttcgatgtatactgatgcagacaagcatttaaaggatttcaatgcccttaaccaatatcagcaggaagatgaggatatttggggagaagaaccggaagcggaagtgaatgaagaaatcgatgaagaagaaatcctcttgatatctgacgatttcgtaatctccgaagaagactacataaacaagaagtccaaggaaaaaagcaatgctttcgttaagctggaaaatgaccctcgaataactaagattggacgtattatacgtaaatatagtattgacgagttaccccagcttattaatattttaaaaggggatatgtcaatagtaggcaaccgccctctcccactctatgaagccgagttgctgacaagcgatgaacacatcgaccgtttcatgggtccggccggattgaccggtttatggcaggtagagaaaagaggcgaagccggtaaactttctgctgaagaacgcaagcaattggatatcacctatgcaaagacattctctttctggttggatataaagattattctgaaaacagttactgcattcattcaaaaagagaacgtataatctccttccagatgatagactcttatatctacataatagatgatctggtattcttctgtacagggcttttgctcctatacctctttgtgatggccatagcctcacatttcaaacatatcacctacccgaaggctcaaaaggaatatggttgtgccattctcgttccggagggaagtattcttccggatgtgtataaagaagaagagtacgagtttatcacatacagcgatctatatcaggcaatcaacagtttagatcaggaacgatatgatctggttctcttcctgtccaatacagcatgcgctttatctccgcaattcctgaataagatatataatgcctatgatgccggtgtacaagccatccaactacatacgatagtagaaaaccgcaaaggcatccgtaatcgcttccgggctatacgtgaggaaataaaaaacagcctctgtagagccggcaatacacaattcggactgtcatccaatttattggggactaatatggcaatcgacctaaaatggctgcaaaagaacatgaaaagttctaagactaatatcgaacgaaaattattccgacagaatatatacattgactacttgccggatgtgattgtttattgccagtccgcacccgcctgtccttaccgtaaacgtatccggaaaacaacttcctacttactcccttccatatttgaaggaaactggagtttctgcaaccggatcgtacaacaattaacgccttctccacttaaattatgtatcttcgtaagtatttggacttcgttgattaccgtatataattggaccttatcattcggatggtggattgcacttttcggtctattaatcacttatagcctggcaattcctgattatctggtagaggacaaaaagaagaaaaaacattcaatatggagaagaaaacacttaaacagcgaattaaagaaaaccccggcttaaaacaggctgtacatcgttttatcatgcaccccgttaaaactcgccctaattggtggatacggctcttcgatttcatatacctgaaacgcggaaagggttctgtcatctatcggagtgtacgcaaagacctccctcctttcaaccgattctctttgggtaaatattctgttgtcgaagacttctcttgtctgaataatgcagttggcgacttgacaatcggagattatacacgcatcggattgagaaacacaatcataggtccggttaatattggcaatcatgtcaacctggcacagaatgtaacggtcacaggactcaaccataattatcaggatgcagaaaagatgattgacgaacaaggtgtcagcacactgcctgttgtcatcgaagatgatgtatgggtaggtgccaattcggtcattctaccgggagtaactttagggaaacattgcgtagtggccgccggaagtgtagtcagtcattccgtcccaccctattcaatatgtgccggatgccctgcaagaatcataaaaacatacgatttcgagactaaagagtggaaaaaagtagagaaaacacctgctactaaccataaatagtgagaatagctacagaatatacctcataaaggtgattgtgacacattctgaaacgcattatctttgcagtatcagaattgaattaattagtcataattttattacgtagccacatttaagtaaaaaatgaaatagagtcccgccgaagcgatttcgtcgggattttgttttttattaccttaatccaatccacagacttaaatcccatataaataaaaaacgagctaattctttttatagaaccactcgccactgcatcagaaaagcctaaaggcttttccatagtacctcaaatttcctgaaaactaatcttctttttacctaaaaacgtcttacctattgttatccttttaccttctactaaaaacttatcctattgaactaaactaaaaaacttttaataccttaaactgtctaatctaataccttatttaatattttcttttaccttataaactaacagcaatttctcaactgctttgcaaaggtacgaatatttttcgtgtacgcaaacggttttatattttataacacttccgcaggctataaatctttcacatcgctcaatgcaaccagcttatttacaatagcatagatagtcaaaccggcagcactatgtatttgcaattttttgctaatatttcttcggtgtgtaatcaccgtatgaatcgacaaaaaaagcttttccgctatttccttatttgtcattcccttcaccacacagatgacgatttctttttcccgctggctaagcgtatcctgattatccatctcttcttcttcggaaaccacattcaataaacctgcaattttcttagaaagagtttccaaatcatcgaatatcgaaatagactcatcatacttacccaataatgaagcatctacgaaagaagtaaccaacgctattaaacgtattcttttaccggatatttcttctcgaaacttagctacatcaaagtaatcaccaaaagtaggattgacaatcaacatttcgggacattgcgttcggacgcaatcgtgcaaagcttcaacagacagtaattctattggttgtacttttacgttagaaagacgcttcaatgcagcagtcaacccaccacgaataattacagaggtctctgcaatagctattcgaactacttcgttatttttcattttccctaatcctcctttccaaattcagaatagcaggaacaaaaatatagtcctcaaccttgcaatgagattccagtccggcttcgcaagcatatatgtcgaaaagagccgcgttcagaagattttcatttgctttggcagggcaatatttaataatgatatttttcagttctgtcaatttctcccctacctgatcgtgatgcttggaaaatgtactgatctgatagtttttgggagcaactcctttaatcaatgaatcgacatacttaaatacggttttctcttcataatccatgtgcttacgcacctctcgtgtatattcatcgaaaaacttaaggatgagaaaagcaacatcgtcttgcgaacagtcgattgcctcgatcaatttacgacgaatagcgggaagagaaaaatccagaaaataaatatgtgcctgccgcagataatcaatcaatgcaggtatggaaatatcatctttatctccatcgagccgggaaaagccttcagccataaagttgactacaatcagaaaggtccggcagtctactccattcagttcacacacctccttgactgtcttgtcaccgaaccccaacgaaagcccaaaacgactcatcacttgcaacaaagaataattatcgctgatgagatcgatcatcttatcagttggcttatatttttgtaaattatccatcatacctatttatattagagactgcaaaggaacggaatattttgctgaaatgcaatcatcatttataggtattttaattcgccggaaatagccaaatactaattatatgctactattttgtagcgtaactttaggcaagctagtctttttttagtaattttgtcgctatcaatttgtaattagtaactcgtaatttgtaattaataaaatggcaaacgaactcgaactgaaatacggctgcaaccctaatcaaaagcctgcccgtatcttcatgaaagaaggcgaactccccatcgaagtattgaatggacgtcccggttatatcaatctattggatgcattcaacagttggcaactagtgaaagaactgaaagaagctaccggactgccggctgccgcttcttttaaacatgtcagccctgcaggtgctgctgttgcggtagaaatgagcgacacactgaagaagatttattttgttgatgacatgaaactatctccattggctacagcatacgcccgtgcacgtggagcagaccgtatgtcgtcttacggagactttatcgcattatccgacacttgtgacgaagaaacagcacgcatcatcaaccgtgaagtatccgacggcgtcattgctcctgactatactcccgaagcactggagattctaaagaataaaagaaaaggaacctataatgtaataaagatagatcctgcataccgcccggctcctatcgaacataaagatgtattcggagtaactttcgaacaaggaagaaacgaattgaagatcgatgaaagtcttttgaaagagatgcctacgcagaacaaggaaatcccggctgatgcaaaacgcgacttaatcattgccttaatcactttaaaatatacacaatccaattctgtatgttatgccaaagacggacaggcaatcggtattggcgcaggccaacagtcacgtattcactgtacgcgcctggcaggaaataaagcagatatctggtatttacgccaacacccgaaagtgatgaacttgccgtggattgaaaaaatccgtcgtgcagaccgtgataacacgattgacgtttacatttcggaagattatgacgacgtactggcagacggcatctggcaacagttcttcactgaaaagccggaaatactgacacgcgaagaaaaacgggcatggttggatacgatgacaggcgtagctttaggatcggatgcattcttcccattcggagataatatagaacgcgcacacaagagtggcgtcagctatattgcacaaccgggcgggtcagtacgtgacgatcatgtgattggaacttgcgacaaatacaatatggcaatggcatttacaggcatccgcttgttccaccattaaaaatatcgacagtttttattccatacatccccatttataatgagaaggagacaaatcttccattataaatggggatttcctatttctttaagaccctctatctttgcagcgttacatttaaaaacgaatcaaagatgaataaaattggtgtattttatggttccacaacaggaacaacagaagaccttgcccgtcgaattgcagagaaattagatgtaccatcggcagatgtatttgatgtatccaagctaacagaggcattagtcaatgaatatgacgtattggtgctcggctcttccacatggggagcaggcgaacttcaagacgactggtacgatggagtaaaagttttaaagaagtgtgatttatcccacaaatctgtagccttgttcggttgcggcgactctgactcgtatagcgacacattctgtgacgcaataggtattctttatgaagatctgaaagatacccactgcaaattctgtggagcaacagatactgcaggctataccttcgattcttccattgccgtcgtagacggtaagtttgtaggtcttccacttgacgaagtcaacgaagatagcaaaacagacgaacgtatcagcgcatgggccgaacaagtgaaacaagaaattagctaattttaccttaacataaaaagaatactttgcatcatggcaactgaaagaatcatccccggcgaaatccgaatttttcttaatcatatttatgagtttaagaaaggcgtacgcaacatggtactttacacaatgagtaaagagcacgaagaatttgccatccgccgattgaaaaatcaaaagatcagttatatgatacaggaagtaggtaccaataaaatcaacctgttttttggaaaggcagaatgtatggaagccatgcggcacatcatcatccgtcctttaaaccaactgactgctgaagaagattttattttaggagccatgctgggatatgacctttgccagcaatgcaaacgatattgcagtaaaaaagaaggtataaagatggcagtttaagcgataaccttagcataagtttagctttgtttgtatgtagtttgtctgagttgaatcgtttctgaaaaggtagtttcctgatggtagatatactcaaggaaactggttgtagaagaaacgattcgctcaattacaaacaaaatcggtgacactatgaaataataaagacaactctacacactaacaacagacaaaggtgtatatcagtaaaaattatcatactgaaatacacatttgtctgttttattttatctactactatattttttttactctttagattaaaattacctacatatactgaatttaagaaacaactatgcctaatattaggtattgccacattttttaacctaatctaactttgcagccgataaaattattaaaaagatgagaaaaataacagcaatcgttattcttagtctcctaccttctcttacaattccagcacaggagacaaaagaaatttccaaaagtagtaattcttcttctacagaagaatatacaaaattccgttttggaggatacagtgaaatggtcgctaattttaaagattatggcatcaaccgtttctatggaggaaacgatggtaatccaaagaaaaacaggaataccatttcaattccccgtttcgttttagcttttgattataagttcaattccaaatggatactcggtgcagagattgagttcgaatctggtggaacaggtacagctttcgaattagaaaacaccgaaaacggtgaatacgaaacagaagttgaaaaaggaggtgaagtagctatcgaacaatttcacatcacacgtttaattcaccgctccctcaatgtacgtgccggacatattattgttccggtaggattgactaacgcacaccatgaaccgatcaatttcttcggaacttcacgcccggaaggtgaaacaagccttttgccttctacctggcatgaaaatggtctggaaatctttggttctttcggaaaagggtatgcaagcttcgattatcaagctatggtggtagcaggcctgaatcctaatggattcgatcgtaacacatgggtaggtagtggcaaacagggaatctttgaggaagacaacttcacttctcccgcgtatgtatttcgtttagattataaaggagttcccggtttacgtgtaggtgcatcattttattattgtgcagatgcaggagccaactctgataaagaacagacttatgcaaactatggaaaaattccgataagaatcttcaccgcagatgcacagtatcgcaataaatatgtaacggcacgcggtaatatcttatatggaaatttaggaaattcattaggagtaagtcaggcaaatgtcaaattatccaataaatcgccttacagccgtctggctccggtagcgaagaatgccgtaagttatgcagcagaagccggcattaatatccgctcggtcttcggaggcaataaaaagattccggtaatctatccatttgcccgctatgaatactacaacccacaagagaaaggggaaaaagggcaaacgatggaaaaacgttgccaagtaagtatgtggacagcgggattaaattggtacgctttgccaaacttagtgataaaagcagactatgcaacccgccagattggtacaaataaagtttttggcgtatcaaagtcatacaacagtgaaaacgaattttctattggaattgcctatataggatggtttattaagaaataacaaataatcaattatttaatttttatatgatgaaaacaaaattcttttatgttgcagccctaatattgggattagcattcacaacaacttcttgcagcagtgatgatgacaacccaacagtagatcctgccaatattgattacactcctgaaaacgcatcaagctggcataactacatgagaaatgtagcagcacttctaaaaacagatgcaaccaatctctacaacgcatggaattcaagctataaaggaggtgaaagctatgcttccctgttcaaggctcatagtggctctccttacgcaagcgccttgagctgtgtggaagaaatcgtggataaatgcgcggaaattgccaatgaagtcggtactgccaaaattggtgacccatacaacttgtataaagccggaaatactgaagaagcattatatgctgtggaatcctggtacagctggcattctcgtgatgactataccaataacatttattccatccggaatgcatattacggttctttagacggtaatataaatgctaattctttatctactgttatcgccggtgctaattcatcattagataccaagataaagaatgctatccaaaaagcggcaaaagccattcaggatattccgcaacctttccgtaatcatattcccagtaacgaaacggtagcagctatggatgcttgtgcagagctggaaagtatactgaagaatgacttaaaatcctatattgcaaataatagcaacaatatcaatacggacgcagtacttaatcctgtagtaacacaatatgtagatgcagtagtagtgcctacctacaaaagtttgaaagaaaaaaatgacgctctctacaatgcagtaatagcccttgcagacaatccgtcaaatagtgcttttgaaacagcttgtgatgcttggatcactgcccgtgaaccatgggaaaagagcgaagctttcttattcggtccggtagacgaaatgggacttgatcctaacatggacagctggcctttggatcagaatgctattgtacaaatactgaattctcaaagttggagcgatctcgaatggagtgaaggtgatgatgaagctgctgtcgaatcggcacaaaatgtacgcggtttccacacattggaattccttctctacaaaaacggtgaaccacgtaaagtacaataaagctttatcttagctaagatattattgagaagtaaaggttggaattcaatgatccacctttacttctttggtatgtttaaaacatattattgaaacaaagtcaataaacaatgaatcactttctaaaatattcattctctttcttttgcctgttggcatgctctgcctgtaatgatgacggaattgacatattggatatcgagattccggagggctatgctctatcagccggaacatcaactattttcttgaattcgtctgttgcttatgacacgcctgcagattggataacaggagcatacgatgtacgtttcacccgaggtgacagactatatgacgatgtacgtacaagtaacaacggtcatggcggcggacttggtcccgtttatgccggttattcgtgcggcagttgccaccggaatgcgggacgtaccaaaccctctttatggacagagggtggatcgggcagctatggattctcttccatgctagtctacatatcccgtaaaaacggagctttctttcaagattatggacgtgtgcttcatgaccaggcaatctatggagtgcaaccggaaggcaaactgtctgtggaatacacttacgagacattttctttccctgatggagaagcctacacactttgcaaacccaattatactatatctgaatggtatgccgaagaaatcaaaccggaagatttgttttgtaccgtacgtattccattacgccatgtaggcatggggcaaatgatggcactagatcctgttgaaattgaagcacttgcagcaaaaagtaattatcccgaatatggaatcagcggacgatgtaattacatcaccgaacgcggagtgagaagtctgggattgtccggcaacaaagctcaacatgccgatttaactgtagaattgggattctccagtgatatgggcgttaccaacagccgctatccggaagaaatctgtgaaggacaaatacaagtaaaccaaggtagcatgatggggctttcttacgaccaactggatgtcagcacagaagagatggaaaacgtagatctctatatgcaaagtcttggtgttcccgcccggcgtaatgtaaacgatccgcaagtaatcaaaggggaacagaacttctataaagccaaatgtcatctctgtcatgtgaccactttacacactaagacacgtggtagtgttttattaaataatactcaactcccgtggttaggcggtcaaacgattcacccttattctgattatctattacatgatatgggttctgaaattatgggagtcggactgaacgacaactatataagcgggctggcacgtggaaacgaatggcgtactacccctctttggggaatcggcttacaagaaaaggtcaacggacatacttatttcttgcatgacggacgtgcccgcaatctgacagaagccatcatgtggcatggcggagaaggagaagcatcaaagaacttatttaagaatatgagtaaggaagaccgggatgcgctgattgcatttttaaattcactttaaactaaaagtagtatatataaagtaattatgaagagatttataatcattgccatgctgactgccataatgcctttggccgctatggcacaacatgaagaagatacagaaaatggtgtagtatcattagctggaagagaaggattcactatcgaaaccaagaaaggagattttgtattcaaaccctatctgctcgtacagaccagtgcaaacttcaattggtacgacgatgaaggactggataaagcatacaatcaagataacatagccaactccggattttcagttccttacgccgtactcggattcaccggaaaggctttcgataaagtatctttcaacctttccataaatgcggcagccagtggaggcgcattacttcaacaagcctggtttgatgttcaactgaaaaagcagtttgccatccgggtcggtaaattcaaaactccgttttcacatgcctacctgacaacactgggagaaacattgttacctagtttgccagtatcactgactgctcccgttatcctcccctattctttgaatgcggtaacacccaatattggcaccggattcgatttaggtgtagagattcacggtttggtagctgataaattcgggtatgaaatcggtttattcaacggtacgggtgcagcggtaaatacagcaacaaaaacatttagtgatgactggcacattccgtctttactgtacgccggacgtttcacctatatgcctaaaggagtgatgcccgctacacagggaaatccgaacaggctgaatgaagacaaaatcatgtttggtatttctacctctatcaatgtagaaagtgaaaatgaaagtaccaatgattatcgtgccggattggagtttgcaatgctaaagaacaaactttacctgggtgctgaagtctattatatgaatgttggcttcacaaaaagacaaaagatttccgagtcatataattacctgggcggctatgtacaaggtggttacttcgttgccccccgtctgcaagcagctgcacgctatgatttcttcaaccgtaacggaatggacaccaatggttttctaaatatgccagccgtgggtatgaactattttttcaagaactgtaatctgaagttacaagcgatgtaccagtatattgcccgtaaaggtcatgatacccaacttgatcgggataacgacgatttaggtttggcagtacattcggccagtattctacttcagtatacattctaaatagcacaagaaaggatttgtttatgaaaaaatacattcttttcggaggttatctactgttattggcatatatcacatcatgcgatgacggacgtatttacgaaaagacagagaccctatcagaagaaggacgcacgctgaagatgagcggtaagatcaatggtatcagtaaatggcccgatggttatagtgttgtagtggcaggcttcaatgatgagagcgagtatgccgttgtcaccaaaacaattccggcggtcgaagatgatgagatccaggttacgatgacaggagtcagtgataaagtaaccactattgaattgtgcgttattaataaattgagaaaacgagttatcagttttcagtcaatggacgaccttacagcagttgacgacaccatccttatggatgtgggaactgtaaatgtaggtatgtaccatggcattcaagaaaaagtatttaatacgacatgcgcacactgtcatggcggaagtagttcggcagcagccaacctgtatctgacagaaggcaaaagttacgaggcactggtcaaccgcccgtcgaagaaagtagatggcatgttactcgtcaagccgggcagtgcgcaagaaagcgtattgcacacattattgaataccactattagttcaacctggggatacgatcactcaaaagaaatagtatcatctccgattttgacccttattgacgactggatcaataacggtgcgcaagaataaatagttatttacccaactgatatgaacaacaaaaaacaacagaatattcagtctgaaaagacgctaacagagatttttaaatataatgcaggaggagaagcttcagagtatcatattatcattcattctactaaaccggaagatacatacgaagaacagctgaatgcagtattaaacacctacgattatttacttacccaagaattgaaaggagcagttgccatcctcaaacgttatttccttagtgacgctgccaatcaggcagatacactactggcattgacaaccgaaggttcggactgcgcactttccattgtggaacagcccccgctggacggaacaaaaatagccttatgggtttacctgttgacagatgtacagacacaagtcttacataacgggctttttgaggtgaaacacagtgcctatcgccacttctggggcggtagtgcattcaatcgtgccgccaattcggaataccagacccgtctattattgaacgactatgtgatgcaactcatggaacaaggttgtaaactggcagacaattgtatccgtacatggtttttcgtgcaaaatgtagatgtgaattatgccggagtagtgaaagcacgtaatgaagttttcgtcacccaaaacctgacagaaaaaacacattatatttccagcacaggcatcgacggccggcatgccgacccgaaagtactggtacaaatggatacttacgctgtagcaggaatgcaaccggaacagattcatttcctctatgctcctacccatctgaacccaacttatgaatatggagtaagctttgaacgtggcacgtatgtagattatggagaccgccgacaggtatttatttcaggaacggcaagtatcaacaacaaaggcgatgtggtatatcccggcaacatccgcaaacagacagaacgaatgtgggagaatgtggaaaccctgttgaaagaagcggactgcacgtttgaagatttgggacaaatgattgtatatctgcgtgacatagccgactatacagttgttaaagcaatgtatgacaaacgtttcccacatactcctaaagtatttgttcatgctccggtatgccgtcccggatggttgattgagatggaatgtatgggagtgaaagaatgtaagaacaaggaatacgctccattttaatatcataaaagattatacagttgaaaaggttacttattatcttatatatctgtctggtgggactactcgctgtgactactttcgtagaacaagcgtatgggacagattttgtagaaagaaatatatatcatacatgttggttttgttgtttgtggggaacaattgccaccattgcacttgttgctctcatccgacgcgctttatggcgacggttccccatattgttgtttcatggctctctcctcgttatcttggtgggggccatgattacgtttatcggaagcaaaaaaggatacgtacacttgcttccgggggcaacgatagacagtttcctggaatcggaaagcggcagaaaagctgatctgccattcacaatacaactagatagtttccgtatagcatactatcccggaacagaagcaccggcagactacatcagctatatcacctactctcttcccggacagaaaaatgttctattacacgaacagatttcaatgaatcgtatatttacatcacaaggtttccgtttctatcagtcatctttcgatgatgacggaaaagggagctggctgactgtcaattatgatccatggggaacaggagtgacttatgcaggatatatcctgctcggtctctccatgatttggctactattttcccgcagtagtgatttccgacgcctgctaaaccacccgctacttaaaaaaggaggtgtatttatactgtttattttctgccttgcaggtaacatgcaagcacaaaaaaaactccttcctgcattgaaacgaacacaagcggacagtttagcacaggaacaggttatttatcacgaccgggtagtacctttcaacacattagcccgtgatttcattcagaaactgacaggagaagcttcatataaaggattgacacctgaacaagtgataggtggctggttactttatccggaagtgtggagaaatgagccattgatatacatcaaaaatacagaattacagcatttattaaacttacaaacaccttatgctcgattaactgatttatttgacggttctgtttaccgtcttcgtgaacattggcaacgtgaacaaggacaacaaaacaaactcgccaaagcaatccaggaaacagatgaaaaagtaggcctgatcctgatgttggaaaaaggaacattcatccatccattacccactgatggcagcgtgcaacctctctccgaactggaagtgaaagcagaattactctacaaccggattccgttcagcaagattctttttatgataaatctgtcattgggagtgttgtctttcctgcttctacttcataacagcctgcaaagaaatatcctctcgctcaaagccaaaacgatttcccgcacagcaggaactttcttttctgttgcactctatcttgctttcatattccatttagcaggatattgcctgcgctggtacatcggcggtcgtattccacttagcaacggttacgaaaccatgcagtttatggctctttgtattcttttgatagcctgtctgctccatcgaagattttcatttatacttccattcggattcctcctctccggctttgctttgttggtttcctatctgggacaaatgaatccccagataaccccattaatgccggtgctcgtctctccatggctaagtattcatgtttcattgattatgatgtcttatgccctattggcattcatcatgctaaacggaatactggcattatgcctccggaaaaaagaatcggaaaacaatgtctccggaaacgacgctatacaagacaaccggatagaacagttgacgctagtcagccgcttgctgctctaccctgccaccttctttttaggagcaggcatctttctgggagcagtttgggcaaacgtttcctggggacgatactgggcgtgggacccgaaagaagtatgggcactgattacttttctggtatatggagtagccttccattcacaaagtctgcgcattttccgcaagcctctattcttccatatctatatgattcttgctttcctgaccgtcttaatgacctatttcggggtaaattatgttcttggagggatgcatagttatgcaaacgcctgaaccactatatatagctagtaattgatagaagaatacccattttaggggattgcgggaaaagcggaaagcccctatctttgcagtatcagaattaaattaattagtcataattatattacgtagccacattaaaaatacatagaaatcggccgaagtgattcacccgcatttcttttatttggttgttaagttgaaaaaccatataatgtattcattttggaatatgaatagatgacatattctaaaagaggcaaggacgttcggcttgtgaaagccggacgtttttttatatcagtaagagaataaagtgagagagctcatgcattcatgagctctttccaaccagccgtttcaaaagcgatatactccgctataaacttctccatctcttctttcttcacaggatgcaacaccagctcttcgagtagggcaaacaaccataccgtattcaggtgaataaagaagttagttattgctatattgatatgcggatatttctgcttcattccttgaaaaaaaacagaaatcgtacgcgtcatcaaatctgtatattcagaacggaagttctccaaaacagaaccttgtgcctgaaaaagcagcaaccgcaaacggtcacgatgttcagagaccaatctgatatattcccgtacagacattttctgataatccgaatccataaagacgtctatcgtcatctgatctgcatcgtgattataaatcatagcatacagatcattcaataccggtttcagaatcgtacggaatatctcatccttattggtgaaataatgatagatattactcaccgtcacccctgccctcgaagctatttcacgcatagaggcatccttgtatcccttttccagaaacacttcttcggctgccttcaagattccctcttgtatatctcctttcaaaaattgcatagtatcgttgctatttatcaattcatatttgtaacctgtctgttcaccatccgggcaaatataccatttttctttttcaattcctccggtgttcccatttcagcaacacttccattctccaatactacaattttgtcggcattggcaacggtgcgcatacggtgcacaataatcagcaccgttttgttacgtaccaattcagatatacctgcctgtatcttggtttcattctcaacatcaagcgaagccgtagcctcatccaacagaacaatcggagcatccttcaacaaagcgcgggcaatggaaatacgctgacgctcaccgccggataatgtttctccattctcaccgataatcgtctggtatccctgcggcattttagtgacaaactcatcacattgtgccaagcgggcaactctccggacttcctcatccgtagcatcccgtttgccaatacggatattatccataatggaagcattgaaaagaactacatcctgaaagacaacggaatagtttttcaacaaagtttcaggatcaatccgactgatatcctgcccgccgagggtaatctttcccgactggatatcccagaaacgtgccgccaacctggccgccgtactcttgccactacctgaaggaccaaccaaagccgttttttcaccttgccgggcaataaaagacaagttattcagaatttgttttccctgctcataagcaaagtctacctgtctgaattcgatatcataaccttgaggagtgaattcggtagtcccgttttgtaccggcaatgcttccatctcattcattctattgatacgcacatccaaatagaacaaagcggcaatattattcatcacctcactgaccggagcatacacacgcgacccgataaccataaatataagataggtaaacaaatcaaccgtacccgaagccaagagattggcaccaacgataataacgcttgccagtccgagtttcaatacactctgggaaccgtttaccaacatgccgagcaccagttcattacgagtcaataccttttcataggtatcaatgctcgcatccagtttttccagatagtctctctcctgattgtaggattttatctcctgaatggtatcgagtccttcctggatatgctcggtcaccatccgcttgttcagataattactttcattgcttttctgtatttccttcttcgagaaaagaaggattgcggcagcaagcggcactacccagaacaaagcaatcgtcaactgccagttataaaatgccatgccgacggtaataagcagaatactgataatggaagcaaacaactggggaaccgcatgcgagaaagtatgctcgagatcagtgcagtcatccataatcgtggcggtgaggtcggaaagattcttttcgccaaagaaagccagaggcaacttgcgaagtttttccgccaatgagatacgccggtttgcactctcatcataaacggtggtataggtactacgatattgcaataccgcaaatatatacatgactatcataaagacaataccgagtatgctataatagagaataccatgcgtcaccgaagccgaaggctgaaacacaggacgaagatattcctcaagaaaaagaaaaacaaataccgccggcaacatcaatacaatatcgagcagtgtagtgaaaaacacacctttacagaaatctttcgctcctttagttgaaagggcaaaacgtctttttattacttcaatcattagaaacctcctttcctattgtccagcgaacagattgctggtattcattccacatatgataatagatgccttgttttccaagcaggttggcatgtgtaccttgttccgcaatcttccccttgtcaatgacgaggatattgtcggcatcagtgatgcttgaaagacgatgagcaatcatcaatacggtttttccttttgtcagttctttcaaggcttgctggatgagatgctcattttcggggtcggcaaaagcagtcgcctcatccagtacaatgatgggagcatttttcaggattgcacgtgccagtacgatccgttgctgttccccgccggagagatatgttccctccgtaccaatcttcgtattcagtccgagcggaagtttattgataatttcccggcattgtgccatatctactgcccgttccacttcctccattgtcgcgtcgggattaccatatttgatattttcgagcagagaagtcttgaacagctttgtattctggaacacgaaagaaatatatttcatcagttcttcgggagcgatttctcttacattgatgccacctattaaaactttcccttccgttgcctcccagaaacggggaactagacgggcaatcgttgttttccctccgcccgaagctccgacaagagctactgtgtttccttgcggaatagtgaaactaacatcatccaccgccttttgattagctcccggatagctgaaggaaactttttcgaactgaatactgaattcctttaccggttgtggatgctctacaacagtcaggtgctcataagcaaccagattctcaagacgtccgatagcttcactcgcctgccccaaagcctgattgagatacatactcttcatgatactttgggagaatacaggagtaatgagaacaaacaggaagaaattaagtaataccgatgcataattacctgaataaccaatcagcaaaatagccaacggagcaaggaaaaacacaaaaccattgattattacggtatagagcgacatcggcttctcccacattcgtgtatagccgaataccattttattataattcatgatacagcggtgaaagtttttgaaagagtaaatagtctgctggaaaaccttcactacgggaattcctctcacatactctacagcttcggtattcatttcctccagagaggtcatgtagcttttcataaactgccgtccctccgcattcatcataaaacccataaccagcatggcaataattacagggacgatacatgccagaccgagtatccaatcgaacacaaaaatcagtatggcagctaccaacggcactagaaaagtagccgcaaggtcgggcaactgatgtgccagaaaactatgggtaacccctgcattgtcatctataatcttgcgaatacgtccgctcgtattaatgtcaaagaagccgagaggcatacgcactatctggcgcatggcttctttacgcaaattcgattcaacccgaaaagctgcaagatgcgaagacatcaatgcggcaaaataaaggacgatgctcgccacggccatgcctgccgcccaccaggcatacgtcaccacattaccggaagaggttatctctccgtgttcaagcagttctctcacaatcagccaaataaggatataaggcaacatgcccgccagggcacttagggcagacagcagcattgccgcaggcaaaagcactttccgtttacccatgtagttctgaagttttttcaatgtactcataacgtacgttcaatctatattaagttcgacaatcatttaacttatcgcttgttttcaaaaaagcacaatattcgaaatcgttcaaaaaaaagagagcttatatttctataagctctcttcatcccattcaatccggtgcatgtgcacctttgatatatgattaatctcgactcgtctctcactgattcgcataagttttcaaatattttctgcaaaggtacagctcgccggcaagacggacaatacctaaaaataatgaaatttgctattcatgtttcagccatgcacttggcaatacttctttttcacctttttcattcaccagttccatctgcaatacgcctccgttacaatcgaagtaacgtacctctatcggatgaagcccggctttcaaagccttctgcacaataatctctaccggcgaatgtgctccatcattatctcccaacaattcaccgtcaagcattaatgtgctaccgtcgtccgagagaagggcaaatgtatagataccatcggcaggaacttccagatagccggtcaataccagaccgatatttcctttcacctcttcgggaatggataccgattccaccacatactcccctttgacaggagctgcatcaatatccgcacaaagattaccacggaaatcgtgccatactgctttcaagccgggctgcaaagcagccggagcagtcaccgcctccgcataaggagcctttacatacttggtacgcaccgcatccgaaggagaaccatccggacgaaaagtgcggaaagcgaaatccgtagtcttcccaacttccaaagcaccgttataaagagctgattctttggtaggcatactgccgtctgtcgtataacgtatttcagtaccgggtaacgggcaggtcaattccacagttgtttcatcaataaatgcattcactttatagaatccctgcaaatcaggcaccctataatttaccctcatcacatccatccgcttaaattgcggaacaagctgacgataaaattcttcgagacccggtttagctgtcggctccgcccaagctatttcactcaacgctatcatacggggaacaatcaaatattcaatgcgcttcattgtcggaatccattcagcccagagattcgcctgcacaccccagatatatttcttctgttccggcgataaccgctcgtctgcacacggatcatacgcaagtattttctttactgaattctgatcctgcgcataatcgaaatagaaatattcattcggacaagcaatcactttctgcttttgtgcagttgccgtaggcaatgcatctttcgcccaacttctccaccaggtaatggcagcatcggaagataatccgtcggataccacttcatcccagcctatgagtttctttccgttggcaaggaagaatttctccatgtcacgtacaaaccatgcctgaagttcttctaccgaacccagtttctccgtacgaatccgtttctgacaaagaggacatttcttccagttggctttttccacttcatcaccacccatgtgcacatattcataagggaaaagttcaaaaacttctttgaacacattctgacagaactccagcgttgtatctttgcccggacagataggagaagagaaagttttcccccacccgattaatccgtcacacaccaattccggatattgaccgatagctgccaggaaatgtcccggcatatcgatctcgggaatgacatcgatacctctttgcgtagcataggctactatttcttttatatcatcatgagtgtaataacctccatacagcgtatctccttccacaatgcgtatcttatcttccggaatcaggaaatcggtattatcttcttctttcgcacgtgccatacaggtacgatcctgcgtattgaatttacgccaggcccctttttctgtaagcaacgggtatttctcgatctctatacgccaaccctgatcgtcggacagatgccagtggaacttattaagtttatacaaagacatcagatctaatacatgcttcacttcttttttattccagaaatggcgggaagcatccaacataaatccacgccattcaaaccgtggcgcatcttctatttgcacgacagggatagaataattctgtttctctccctgcacttctatcgttgcaggaagcaactggcgaatagtagtaatagcagaaataatacccgaatagtcagttgcctctacccgaatatactccggtgtagactcaagtttataagagctaggctttccaacagtatccttcaactgaaaatacatatctacctgactcttatcggtagtgacttcaacagaagacgatatgacattccgaagaatctcctgcagatacccggcagccggaaacaaggactgatcggaaaccccaatcttcattccatcttttaaaacaaacgagccagactgctcggtcagactaacgggggtaggtaagattgcaatctcttgcttgacggtaggcgtgcaagaagaaaaaatacaagctgacacaatgagaaaagagctacttagttttttgaacatgcggttaactatttaataaattaattgtcctgtttttaattgaccatctatatataatacaactaaaacgtataaactactaaaaaggcagaaaaagttttttgcgacttcatatcacagactcctattaatgtttatctttgctccccaatcccattacaaacaattataaagagtcacttcaatgtcaagagagaaaatactaatcacaacctcgtggatcagcacaattggcaatgcaatcttgtccgtatccaaaatcataatcggtttatttgccggtagtttagccgtagtcggcgacggtatcgactcggcaaccgacgtcgttatctctatcgttatgatttttacggcacgcctcatcaaccgccctccttcaaagaaatatgtattcggatatgagaaagcggaagggatcgcaacaaagattctatcactcgtgatattttatgccggtgtacaaatgttgctatcatccactaaaaacatcttttcagatgaagtgaaagagataccatcggctatcgccatctatgtcactatattttctattatcggtaaactcttactggcttcataccagtacaaacagggaaagaagatcaacagttccatgctcacggcaaacgctatcaatatgcgtaatgatgttgtcatttcaaccagtgttttgttaggattgatatttacttttatcttcaaattgccgatactcgattcgataacaggattgataatcagtctctttatcatcaaatcttccatcagcatcttcattgattccaatgtggagctaatggacggggtgaaagatgtcaatgtatataataagatattcgaggctgtagagaaagtgcccggtgccagtaatccgcatcgcgtccggtcacgaatgatagggaatctctatatgattacccttgatatagaagtgaatccacaaatcacgatcacgcaagcccatgagattgccgatgcagtggagaagagcatcattaattcggtagataatgtatatgacattctggtacatgtggaacctgccggtaaatgtcagacaggagaaaaattcggggtcgataaagatatggtttgatccatctctacacagagtttctttcactttcctctatcacctatcaccgacacttccaaaagctcttattcatggggatttcaggggtggtgacaggttgtttgcaacctatcaccgcatctatcacctatcaccgcccgatcaatcaatgattaacaaggagaaaagaacaagtctctatacgacatattagtttcagccgcttgaaacttttagtttcaaggcttggaacaaagtgtttcccggtgtgaaacaaatcgtttcaagccttgaaacaaagtgttttttcaagatgcgcaaatatagtgcaaacctattaaaattcaaatagttataaaactaatgttttaatcggatgtggtgaataaagctaaatagagcatatttgggagtgagttatgttacttatctgttacctcttccaatttgcctactaatcggatataaggcattagttttcaatatattgcattattcttcataacttcaaatacctcaacagtaattaaatttgtaactaaaaaagttgagttatgagaagtacattcagagtgttgttttacactaaaaatcaatcgattaagaatggtaaagtacctgtaatgggacgtattaccatcaacaagaccacagcttgctttagctgtaagaaggaggtgtctatttctttatgggacgccaaagctaatagggctaaagggaaatccgaagaagctagaatgttaaaccaggaacttgataatgccaaagcccaaattgccaagcattaccaatacatatgcgatcatgacagttttgtcacagccaagaaagtctatagccgctatgtcggttttaaagaagattcccacacccttatggagcttttcagggaacagcttgagtcatacaaggagaaagtaggcaaggaaaaggcaaaaagcacctatcttggtttagtagccgattataagagcgcattgctttttttgaaagacaaaaagaatgttgaggacattgcacttgatgaacttgacaaagattttattgaagactattataattggatgttgggcacatgcggctcggccagttctacagcattcggacgtgttaataccatgaaatggctaatgcatatcgctcaagagaaaggtttaataaaagttcatcccttcacgggttttggatgtaagccgggatataaaagacgttcatttctctctgaagaagaactgcagaggcttatacatgtagaattgaggtataaacgtcagcaggctatgcgtgacatgctacttttcatgtgcttcacaggcctcgccttcgcagatctgaaagcaattacttataagaatatccatacagattctgatggtggcacatggctcatgggaaaccgtataaaaacaggcgtagcatacgtcgtgaaattattacctatagcaattgaacttgtagaaaagtataagggtgataacaaaaagaaagattctcctgattgcgttttccccgtcggtgattatgaaaccatgaaaagtagttttaaggttttagggaaaaagtgtgattgtaatgtaaatatcacccctcatatcgggagacatacctttgcagttttggctatattgaaaggcatgccgttagaaactttgcaaaaagtattaggacacaaatcgattctttccacacaagtctatgctgaactgatcaatccgaaggttggggaagatacggataggatgtgcgacaagattggttccgtgtatcgcttggccaattagaataagtatgaaaaaacacccttcagcaaatgttgaagggtgtttttcgtattcaggcaggttgcttatttcaagtaacgcctgaaatctttatagttcttttttagtacctcgtatagcccgctttccggatagagcagtttacccccgacagaggtaattgaggtataaggtattgccttttcatcccgtagtgtttgtaatgtacgcttggaaacatgaagcatccggcatacctcatctccactcagataatgttcgtctgcaatcgtcggacgtatccgtgccgcagcagcctccagattttttcctgtccgtttgatccatccggtaagttccttgaactcttccgaatctttagtgataatgtctgccatactctttattttctttttttgattagtccttcctccagaatttgctggatgtccacttctttataaaagaattttccaccgatattagaataaggaatcagcccgttatcccggtaagtctgcagtgcccttttggaaatattgagagccaggcacacatcctgcgcatccagtcacttgtccggtgttacgggggctattttcttttgaaagtccatcatttgcacggacagcatacttagttgtttcttcaagtcctgataagcacttgtttcgataattgtcagttccatgatttataaattaaattgtgaataatgaaattgggtgcaagataaagggaatattactataaatcaatcgtttagtttccagtgtcgttaatagtcattaatagtcattttttgtcagcgtagcttttcttatactttttatttaacgggggagtcgtgaaatccgacatcccttatacaaatggtaactctttcatcttttttccttttttgccctgccacatttctttatgatatggatttcttcggagaaatcagaaatatgagtatctttggaacgaaatatagatttaaatggcaggcaatagccttccaattagatatagacataacattcgcagaatgtctcaagacggaaatctggtaaatttcaatgaatagaggctttttgtgtattgcttatgctatgctttgtcatagcgtggcttacacagctactattcataggtttaccagaacctccgtcttggagttgggtaaggccacgctttctcaaatacttctgccgaataatatttataggttaaatattatacttatggcaaaactccaattacttgcaatcactactcttgacggatacctcttcgacaggactgtttcttcccctttgtgggataatccgaacaaatatggcctcaccaaaatacgggaacgtgctacacagactctcgggccggatgtatctttcatctcattgacacaatggaaaaagaaaaatgaaggtatttatttcatagaagcggctccggatacaatttccgttataagcagcatgttcagatactggttggtggatgaaatcatcctttttgtcgcaccgtatatccaaggggacggcatacgtctgtttacagaaattcccggtccttcctcatgggaaatgaccgggaacaaatgtttcagatccggtatttgcaggctggcctacaaacggattgaataacctgcaattatcttcttatcctgactgacttggtttagacaggcatcttatatttctcccaatattttcttgccttgtccggtcctatccagttccgttggtcatcgattcccctgtccgagagttgtttcctgaccagcttctggatatcaatctcccctttggctatcttgatcagcagttcggaagcaatcgtattcagcattaagtccggattcagttcatccggtatctcttccatttcttttttcataagtcgcttctttattttttaggtttattatccttgaaagtcatctcaatcctgtaattgtcatccagctcgagtgatgcctcatacttctttcctttcttgctggtaaacttcagatatccggtacgtttccccgatagcagcaggagcatctgattatccgtcagttccctgccgttgaacgttctaaataacaggaacccacaattgggatcgctgcatttggcgaccttgttaaagacgataatcgtttctgctccgcatttggggcagttacaatgtggcaagtccggatggttaagtttcagggcaagcagttccgaggtgatttgttgggtataggaattgatgctctgagtaaatgtttccgtggaaactttgccggtttcgatttcatgcaaggcgcattcccaccctccggtcatgctcacgttggcgatcatcttctcttttacaatatcatatacttccagtcctttgggagtgggaatcagtgaccgtccgtttctttccacgtagtgtctggcaatgagcagttcgatgattccggcacgtgtagccggtgtacccaagccggaatcctccattgcctctttttccttttcatcgtccaatgttctgccacaaccttccatcgcagcaagcaggcttgcctcagtgaatatgggctgcggtttggttttcttgaccaatgtatcaataccgagcacgggcaatatttcgtcttcctgaaattcgggcagaagacttccttcttctttctcactgggttcgttatagatgcctctccaccccggaactttgatttggcttccttttatcccgaaaagaacgccgttacagtccgcttgtacggataccgtttctttcaggcatttgccggagaaagcctccaacatgcgtcccgcgatcatggaatagatattctgctcgtcaagggaaagcctctggggatagttctccgtaatgattaacgcatgatggtccgtcatcttgctatcgtccacacagtgccggtttaaaggctggttacagaggttttccgcatgccatgtgaaacggggatgttgcttaagcaggccgatgagggaagggacttgttcgaagatgtcttctgtgatatagctacatccggtacggggatacgaaatgtagcctccttcatataatttttgagcaatgttcagcgtctgttctgcggtcagtccgagtttggtattggcacttcgttgcagggcggtcaggtcataaagtagcggagcttcttctggaacctctttcttctccacttgcaccactttggctgtcgtctcttcatacacttttttacggtccacatcgagtttttccggtgtatcatatttcccggtacaggttaagacgagttctttccctgctttcgttgtccgtagctgtagcagataatagggtttggctataaaatccctgttgtccagatatcgacggcaaatcatgccaagtgccggtgtctgtactcttcccagagaatagttactcttgcctgcagccatgctcaaagacaggctggcattcataccgacgacccaatctgattctctcctggctttagcggcacggtacaggttgtcaaactccttacttgatttgaggctatcaaatccttcccgtatcgatttttctgtcatggaagatatccacaagcgtttggtttccttatgatatcccagatattcaagcacatatctcataattaactctccttcccgccctgcatcagtacaggatatcacttgatcagcctgacccaacagtttacggattacttccaattgtttcagagccgtcggatcagccttgtatccatcttcggttttaatctgacggacaaccagtttgaacgggtcgggaataataggcagcatctccttttccacatggacaatgccgtagtcttgaggcagggccaatgccaacagatggccgtaagttcatgtgacggcatatccgttcccactcaagtatccttcctgtttctccgttacgcccaggacccgggcaatgctgcgtgccaccgagggcttctcacaaatacaaattgttttcatgttactttcttttttaatatgaatgactatttaatttttacactcttgacctttgatttttctttccgtacccttttcttcggttctttgggaatggagagcttctctttcttttccgatacttgtatgctttccgtcagattcggcaggggtatttcctttgccggaaaacggctgattaaatccattgagattcctgacattcccgcattcagtttcacctgatctgccggttggaggtatttctccccgttctttccggttgccagttcgtacatgactgtttcacggccctggaggattccttcgtaattttggtaaggaaggtttgattcagacagtccgttctgctgaagcatcccacaaatctcatcgggtggcaatcctccgaacttccggtcaaaaggagaagaaagaatgtacttgtatgttgccagaagctgcttttcatggctcatatcgggacatccttcatattcctgcagttgtttgattttcttttcaatgctgttcagagctttgaaagtatgtctgtccttattctgaataggcatactacccattcggaccagttccatctggatacggttcaggctggacgtttcccatttattcaacagattactgcgattgctccggtaatcatcccggaggatagcgattggatttttggtacgaaagaataatccgatccgttttccccatgagggttcgtggaggttggacgcgctccagcggatcgtgttgaaacggtaagtatccatgaatctcctgaaatgattccggctggtaaacaggtttctgaaagtttgcaggaatgctttccttccggcagccctgcggctacgtggtatctctttttcgggaatgaatgtattatttatcagttccatatgcattataatttgggcttcgcctgctttttaacggaagcggtttttgtcttgacctttttcttttcattgccacaggacagtccgggcttgtcttgcggtttttcggctgtttgagcttctcctttcttagaaacaacaacaggcgggcttacccgatgatagttcttccggactccatccctgtttaacagtgtttgcgccaatgacctggcagcattttgtaattcatccatcttctgccggaaaggataatcccggtacaattccttttgccgggtaatctcacggatacctttctccacaaacaagaaatcctttttataggcaaacgattcgtctgccggtaaatgggcgtatcctctggctgctatgtcctgaagtgtcataatgttccggttacggatagagagttccaatgcgccggctgtgacaaaccggttgagattttctctcgtaggatgcatgtcgaaagtgacggacggcttgtaattcgccagaatttccatcccgacctgcggcatggtggtctgattcccgttggagagttccagcatccggcgggagacggtttctatccggtaaatattcaatgactccacatcctgcaaagagcttgagtagaaattgtccgctgtcgattgcaggtaatcccgaaactttatagtcccggaaagtccgtcattgaatacgcggacaccttgttccgtttcagctatggtgtagaactgtttggcttgctttcctgccgcaatcttctccatcgcatcttcgtgtgcaataaagcacttataagctggtgagtagtccagatcccggatattctctgccgtcagttccctttggcatgctctcaaataagccgctttccgtaaaggtacggagttgttttcagtgatgcctccgtaagaggcgatgaaactgagggctttctcactgtctttcgccggtagttcgctggtgaaaggaatatctttagcaggtattccctcaaaatgcagcaataagttatccggtatggttttctgatccatagcaatccgggcggtcagatccataaatacctgaaaagagtccttatccgtcggaacatacgacacgaccatgacagtcgagacttgattatccggctgtaacacaataaacaggctctttaaatccgctttagcggtgaatgtatcttttattttttccatccatgcaggcatgataatcagttttagatgcggggattatgtgacttgttctgacgggaagccgtctttctcttttccgaagccgccggtccggtcagttgcaacggaggacaggtcagtctgtatctcaggccaagtatcttgtccgcgagttgctgctgcctgttttgaatattgtagaatgccttttcactatatccctttttggattgcagttcggacatttcttgatccagcggtttaaaatttcctttgtgggtgaactccttatagctttcattagtattgaaatcagccggtaatccgtattcccgtataaagagcagggtgaatatctcggcattctccggcgttaccgaaagccggtaatcttccgtaaactgtttgaatgcatggtatgtcggctctatgggatagccgcctttcttcaacagctcggattgctctatcggatacaatggcattttcgccagctgcccgtagaaaggattggaccggaaaaggtccagatgcttctgcatgtaatgctccgtgctatggttcgggcaggaaatatagaattctctgattcgtcccagagcctgtacttccggagtgaagaaacggtcagccagatattgcaggtaacactgtttatagatggctccttcatccgtggcgggcaggtagacggctcctttgggagtctggagggaaatgatggggtctatctctttgttttgcaggctgtccgggataagcccgtaatcacgtttcaggatataggccgcctgatcccggatctgtgatttgaccttctcctgtccgcctttattttcagccggaatattctgcagcgcattgaactgggagttgaaagaattcttgtgtatgaacggaatccttctggttgtatagtctatcccatagattcctgcggtttcctgtaaggatagtaaccggagtatctgggcattggcaatactggggagcacgttataggaggaagcaaacttgtcataggcatcgaatgtcggttctatgcggtggctcctgtccagccgggcattccgcaggatagtcgcatccagatattgtgctttctccggcagaaaagagtttgtatataaggagaaggcattgggagatgcttggaatgcctttaccacttctgcgtccggacgggtcagcttgtacaggttgacaaactccggtttctcttcgtccgtaatgaagaaacggtcggccagatgttgcatataggcatggcagcatgtctttccaaagccggaatattcgaacagaagcactcctttggcggtttccacggcggtcagggtttccgacggatcgtcgtggagagtatcctgtgccagcgcgaaccgtttggcttccggctgtacaagcaggtggtcggcaagtccgctggctaccagcatgggcaggcttttttcttcatcgtgagaatgcaggtattccagtccgcgcaatgagacattgccctgcatgcttcctccgttccgggtgatgaatttttgtaccaagctgttatccttgtcaaagagccggatatccgggtagcttactcctgccggaaactggtagcggcacagataaagatccggcaagtggctttggacaagggacggcttgtacatttccctttgccgctggaggtattcggtgaatcgttgattcatcatcgatacttctttctccggcatcaggtgcatctccagttgtcggggttgcccttccaagtcctgggtaacaaagaaaatcataatgtttgaaatctcttgcttttgcatacgattgaaatttaaaatagttacatggtgatacttctactctttttcttttcctgtttgggcggttcatagccccgtaccgcatagtccgtctgtaggattctctttgccgtatccttgatggtccgttcaagtgcatttttcagcagtgtgccatcctgcttccccacataagacagcctgatccgttcatccagggagacaaagctgttttgatggttgaaccggctgtctttttccaaattcccgatttgcccggtcttgcagatccggtcgagtacgcctatgttataattcttctggctcttgcccagattcaacttttcggccagttggttataacattccaaagagggagccatgctgcattctaccgccggggtatagttggctatcatatttgaatccaggaaatgagccttttggggaaggtatatcttttttaagccatgttcaaacatgttcgaacactttgacgcctctttgatcagattgatattggaagtgctgaaataatatatttgcagtttatccgcatccctgtaaaccggcgagaagaaattatcgccaatatgctgcaggtatttctgcgcacactgtatccccctgccggtatcattgaacatcaggactccctggttcgtatttattgcagtaatcaccctgttgtagatatctttttccttttcttgatggaatgcgcggtaagcgttcagttgttttttcagcaggggattgtctttggccttttgaagcattctctggatgctatccacattatggatgccataaggagatgtattctcgtaaacgaaggcgatatcccgcaatgggaaatgagttgcacaagacagtcctccgttatgggtcatgtccttgatgaacctttcaatgttccccggttgtacagcaccctgatatggtattaaatagacttcttccttaggaatgtaggagcctttcaaggccagttctgcctgcccgaaaagaaatttgccgccatctgaattgatgccataacgattctctatggtctggaaatgttcaatctgcctgttgctgttcaaattgaaaccaatgtatgtactcatattattttatggtttagatgaatggttgattaagatagtctatgccgtttcgacgggtcgggaacttttttattcttcattttctgctccattttctgtttttcttccaggtctatagtccatggaaaacaggtcatgatcttgtccgggcagcaaagggagattcttttttgtttcatggactcatcatccagccggatatagacaaagtaatccagttccccttttccggtttcttcaatggctgttactgttcctttatagggaacaacgggagtttcctcttccggatcgttctctacaatccgcgctccgaggtacatctgacttttaggtatcatatcgctttattttaaacggttattgttatgtctgttcttattctcagtctttttaacggtattcttctcttccggcagcggacagagcagtccgtcctttatcacgtatgtcctgacgccgaagggcttggaggaaccctcaattctgccctgctcaaagtcggtcttgcaaaaaaggagatgccttgtcgcctccttgttgttttccgggagatacagtgcgtatcccgaagccagtgccgtcttttgaacttcattcagttttcggcttccgacggtgaaggtaacggtggagtcattcaacatattctcaagggaacggtgccctctcacatcgaaatcccttttcaaaattccatcggcagccttccggatttccgtagacaaccgcttgaactttcccgtatcgaattcgccggcagatttaacctgcgtgactttttcaaattccttggcatacggcagcagttcattgaaataggtaaacggttgttcatgaatattcatataaccgttacgcatgacggtcagcagccggtaaatgtcatggttctcccggctgatggaaacctgcgtatccttattgaaatgccagtcggtggcgaattttataaaatccccggctgtcgcttccatcgaatggtagcataccggttttaaactgtcgatgaattctttgggcagttcgtcaagaccgatataggatgccggataaaaatcgaaggaataatccagttccatcggtttgcacggcttgtaagcggcatctatgagaggaaccaggttcttgtccatgaacgtactgtcgtagacggccagatggccggtatcgtagtgcgggtcgaagtaatggtccgtgatgtaccggatgcactccctgaatccgttcctgccgatctcgttaccggaaaagataaggtatccgaagtcattctccaccacttttaaggggaatgtgtaccgcggctggcaccggtacaatgtccttttttcctgttgctgtaatcgaaactccaagtatgcgggttcctgcatgagatacttcttcaatatgccgccgtccggttcattcttgtatttataggtatagaccgcatcacgcagggaaatgcgtttggcagggggaatgcagtgttcttgaaaatacggcagcagttccttgctgatatattcctcgaaaggggtatgggtatctaccggtggaacctgcctcatgttcgccaggtcaaaccggagcagttccgtatccggaatataggggcagcactccgcttccttgatattgtcaatcaggaatttgcggaacaggctgtccgcatctcctttctgaatgaatgtgagggcatttcggggctggtggggagagtactgatggtaacggtccataccgacaaaaatacttcccggcttgtcgggatcgaaaaaaggattttccatttggtttctcttgtccatatttctacaatttagggtgggtatttcttttctttttcacgtcctgctttttattcaaagccttttcgatgactgttttcactttgaacacctgtttgttcgcaggaggatccttagaaaatacgatccgggtgaaatccccgtttatccatgcataggcatgggacgggttgctttttgcctctcccggcaggaagagtccgtgccctgccgccaatacttgccggtgaggggtaaagagccggacaccgtctacggtgacacattccatcgggtcgcggaggatgttcccaacagtccggtgtccacgcacatcgtaatactgcttgaggagtttgtccagcaaggctttatcctggccggtttcttctatctgctgccggatatccgatgctgtaccttgtttggaaagctccagtaatttacggtccttgctttctatttcctccaaaatatcagcgatattacggttgcgatggctgctggtacaatgcatattgtggcagaaactaccgaaatcctcccaggtcggcttcatctcattccggtagaccagctccatttccggtgtcttatccatctgcaggtaagcatattccgggtacaggccttcacccggattgacataggatccatcctttaggactccttctgcccggtaaacatttaccggaccaagattgaaatggggatcgaagtaatggtctgccataaattgcagaaagtcctgcctgtttttctgtccttccgtcgtatcagtaaagaacacaaagccatgggctgtctctatggctgtataggattgttcaggttgcttcatatcattacattttgagggaattgttccttttcgttttcgatacctttttcaaagccggtacatatggaatgattttgccgtttttctcctgatacacggtcttgtttacgggagatttggtatatgccattacccggttgcatgtcttttcggcatggaggaaatgtaaatctggcattgacttggatatttggggacagtagatccactttccttccagcaaggcttgcctcatggcttcgccggcatcggttccattgatgagaaacgggacgctcctgtcattcagtgtcctttccaatgtacggtgtccacggacatcgaaatccgtcagaaggatattcttcgctttccaacgcatgtcatccagcacatctgacaaatctggccccgaggactgtccgttgatacagtcgtctatccgggtgacatactcctgaaagacattccggtatccgaaatcgggatcatttattatatcccgcttgaatccgttctccatcagatacaacagtttgctgatatccgcattgttacggctcgcaggacatccggcaaattcattcaggcggagaaattcagaagcgctcggctccatgtccgtttcaaacgccagtttccactgtttcctgtcacggaaagcctcttttgagaatacagcattatcaaaatcatattccccttttccgctttggggattcttccggtagcaggcatccaccaaaggacagatatcgtcggacaggcagttgacgttgtattgcctgacaggaccgggttcgccatgaacccagaaataattgccggataactgttggtaaaagctcttcaatccctcccgtcccattttggtatcactgaaaaacaagattcctttggacgtttccacagcatgcagcggtaatttgtaaaccggattataatcatacctggcagccagctcatcctgcttctgatgaaaatggaccagctcgtccaactgctgtgtggtcagtttcggaagttctcccgatatcatgaggatatcgctgcgtgactgcgcaaacaggacatttctcagattggtacttattagaggagccagtcccttttcccggatatagggtagtaatacctgattgatatattcctttttggaaatatctccggagatagccggtacatccgtcatcttcgggaatgaatagatttccagacgggtattcggtacgaaggcggagtatttggcttttatcgattgttggctgaacaaggccataaacgtatagacagggtcttgcctgtcgggattggcaggataaagcatataggaggattctgcatggggtttctccttgccggtttcataaccgacaaggagctggccttcaccgtctttcctgaaaagctcgtccaatagtttgggatcatcagaaatataggttgccatttttcttacattttaggtgtgatggacggtttacgggtacgcggtttcttttccgcttgctgtgaggcttcctcttttttccggggttttccggctacttgtaccggtgcatggggctgctgctggcttccgtcttgttcctgaccttgtttctgtgcctcttccaacttcttggtgcttctttcccagaggaattccacccctcgctcggcggcactcatctggatggaggtggcataaaattttccattatcagacttgaaacggatcggtacttcctcaccgcgcacggcagcatcgtattctttcggagaaagcgtataatctttcaccttacgcggaatgcgtgcctgctctacgggcatatggaacaattcattggtcaccgggtctttggaaaggtagcaggatttggtttctttggtacggtagtcaatgactacatccaccgccttgccgagattgccggtctggttcagggccttgaggtcttcttccgtcaggacatgtcccctgtagtcttccccgatcttgggagcctgacggatgtagtggatgtcgaacttgacagctccgttctcgtcgcggaacagggagagtttggcatccccgttttcacgccccagctcggaattttttgccacacggaaagcgatagcggaagtctttccctgcaacattctttcgaggctgtcctttgcgttcttcagtccgtccggggtaatgccgtatttggcggcctgttcccaattcacttcccgctcgttgaagcgatggttattatacaccctggtcgaagccagttcccttctgactgcttcgttctgtggttcctgcgccgcttcgatcttttctttggcctgctctacgagcgtttccttcggcatgttgtagagggagtaacgaccgggattattgtactggtagagaaaattcttcccgaagttggtgaagaagtttccacgttggtccactttgataaactggtccttgttcgcctcgttagcttcgagcgtttccagctctccgttcgctgcgattccttttacacctttggctttctgctctttcttgtcatacgccatcaaatacccgtgttccggggttgcttccttgttttcaggagctaaattcacatcgttcatatacgttaattttaaagattaatgaatcatttacgagggtaaaattactatctttgtcattaaatagtttgattatgaggaagttgtcattaattgtcatgttctgtcacttattgtcatgtccggcttttgcacagtccccgtcaaagggatataaagccggactcagtgctgtcatctaccgtatccactctgcccggcagtgaaagtctttcatatgagacagccggttgccggttaccgtactggccgattatcctattctgtatccattgaatgaaagtcggaggaggtatgccgtttcttccggtttcggtataaggatgcatccggtgaaaaagaaaaggatactccatgccggagtggatcttgccgcaccctatggcacgccggtctatgcttcaggaagcgggaaagtcgttgaagccaggtatagcagcagttacggctggtacatcgaaatccggcacgcgggcggcttttccacgttgtatgcacacttgagcaaattgcatgtgaggaaagggagcgatgtacgcataggtcggcatatcggcaatgtcggtcataccggcatagcgaccggcaaccatctgcattttgaactgagaaaaaacgggaagccgcagaatccgttgcagtgggtgatactaaaggattcccgttctaaaaagagtcattaatttaatccgttacacaatgaacattgaagaagccaagagcattcagttggaggattatctccggcgtatggggttcaacccggtaaaacaacaaggggacagtatctggtattgttcccctttccgtgaggagaagacaccttctttcaaggtgagcgcatcccgcaacctatgatacgatttcggcatcggacagggaggggacatcatcaccctggcgatggagcttcaaaagacgaaggatatctcttatgcgcttaaaacgatagagggacattttccggctgctttccgtccagtagcagcctctccccggcaggcggaaccgcaggctaccggctaccggcaggtacgcattgatccgctgacgaacccggtcttgctgggatatctcaaagaaagaggcatcttgcctgaaatcgcaagggaagcatgcaaggaagtgcattttcagaacaagggaaaatggtattttgccgtaggctttgccaaccggagcggcgggtacgagatccgtaacaaatacctaaaaggcagcatatcgcccaaagagattacccatatcaaaaatggcagcgaccgttgcatagtggttgaaggctttatggattatctctcatacctcacgctcaaggctacgcatcccggtaacggacagcctaaaggaaacggtccggactatatcgttttaaattcggtcagcaatgtaggcaaggctatccctgtcttgaaagagtataagagtgccctctgcctactggataacgattccgccggaaggcaggcttttcagcagatggcgcaagccggatgcccggtcagggacaagtccgactgctaccgggagtataacgatttgaacgattacctgttgggcaggaagatggcgcaggagaacaagacggatcatcagcacgaaacagccccgaagctgattgaaaagcctgcaaagaaacagtccggttgaaaattataaaataccggtccttgtctgatgcatgaaaggcaggcaataaaaaagagagtcaaatccctgctggagggaatttggctctctttttattgctacccggctaccaccggatatttattcttaataatttctgatcagcaattcattgaccgcttctcttttctcggctatggaacagatggaacggaagatgctgattcgctggatatggaaaccggcatagaggtcgtcgaagaaggtgttctcagggttcttttgccggggatcggagttggaaagcattcatttggcaccggtttcacctattcccttgcagaaatttgccaggttgatctgctcttcatctccgaagtcctgtggcatgtaggaggtgcaggagttaccctcattgaccggcttataaggcgggtcaaaataaaatagggagttggctccggtgtattctgcggtctgccggtagtcaccgtccagaatcacaacatcttgcagcagcttgtggttaaagcggatcagttcctcttccaacagttttacccgtcccccggcaccaaaagtgacggacagctttccgctatggttcacggagtagatgccgttataacaggtacgcatgaagaagataaacagggcggcacgggtgatgttattcgggtttccttcattgtagtaggtacgtttctccatgaagtagacccttcttcgggtatgttcctccagcgcgatgtattcgtcctgtatccgggcaagcactttaataagctgctccggggattccttgatgacgcggtagacattgatcagagcctcgttggagtcgttgatgacgcaacggatttccggataggcttgtcttattcagaagaagagggcgccgccaccgacaaacggttctacataggtatccatctgtccgaagtctttcggaagggattcgataagtacgggaagcagtcttcttttacctcccacccaggggaagcagggttttcccggcaggttggccggagaacttttctttttttccatgtttacaacatttaaatgattaataaattaaatagggattattcatcgtctgccgtttccagcaggtgtttcaagttgggatcattttggatgcgaagcagctctttttcgatgatttgcgtcacgtcttccttgatttgatagtagttcctttcgatttcctcttgcatgtggtccttaccatccgcaccggtaaagtcggttatgacggggataggcttgtaggcttttgtttcggcggctacccgttcattgtccaccacgatctcgcaatggaatatcttctgttctatcttctccccgaagttgtcgcagacactgccgacaaactctccttgcgagaggttggagattttggaggcaggtatcagcgagtcgagctgggtactgatattggttgaggtgtcttcacgggtcatattaatggatttgcgctgttggagcactttcccaaacctttcagaaaggtttttcgctgtttctccgaccacttgcccggaaaagatatttccaattgtgttctggatcacccgcgcctccttatcaccgtagtcacgtattaactggctgaaatcctgtgctcccagacatactgccactttgttgctacgggcggtagcgatcagggtgtcaagtcctttaaagtaaagtgtgggaacctcatccactagaatagagcatttgagcctgccttttcggttgaccattttaacgatacgggcattatacaatcctaacgcacatgagtaaatattctgtctgtcagggttattgccgacgcacaaaactttgggttcctccggattattgatatccagcgtgaagtcatctccggtcataatccaatataaggcaggtgagatcagccttgatagcggaattttggcggaagctatctgcccttggagctgctccatcgcaccacctttccatgcatccataaaaggtgacaggtaattctccagctcccggtaagaggtcagtatggtgaacaggtcggaatacggtttattcaatagctctatggcatgtgggaaggtgcagaatttcccgttttcatagattttaagataccagatcaccgccgcaaatagcacaatcgggctttctacaaagaaatctccctgcttttgaatccaactcttgttcaaatttaacatgattacatacgctgattcgtatgcatccgcgatatcggatagaaacgaaggattgaggggattgcaccggtggctgtatctgggatcatcgaaattaatcacataaaatccgaccggcttggcatacttatccttgtttttaagcagctggttataagcaattatgcttaaatccggatacttaaaatcatagatataggcggcgaatcctttctctatctgctggcggatatagttattgatgatggcataactctttcctgatcccggcgtgcctaatatcaatgaggcgcggaagggattaatcacgtttatccagcctgaataggtctttcgttggtaacggaaacgggtgggcaggtttaccgagtattcattggcaatcaacctgcgctcctgcatgaagctctcgttctcgtcgttaaagacgtcatccatgagttggttcttcaacaggcggctgatccaggttccggcggtaagcaggctgatatatccggcagctacggtagctacatataataaggttagaagcgcgacggggaagcgtgccgtcagtaagagctcgctaccaaaaaagagcagcatcccggctataaggtaacagccgatactccttcatgacatctccacgtccttccgtcctttcgctcccatgcaggagaagaaaaggaagagcagactgaaggacttgctcaccagcgaatgggaaaacagcccggtatcccgctggaaattgagcagtatcttgtccacgacaccgatgttcaggttcatggaaagaaaatagggatagcagaaataatagacattcatcactaaaaataggatgctgatggccctcatgaagtcaaggttcttattgagccctctggtttcgtcttgtgacataagcggtatgataattaatggtgatacattttattagcccagatgcggacctctgcgttttctctttttctttttcccgtaagggctttgcgtcaggtcgtctgccggatacggataggattccaaagagaatatatcaagcagtccttccaccagctccgtctctttcatttccggttcggacggatggataacaggggcttcttcagtcttttccggtgggatcgtgccgtacttccggtttataaccgatgccgaatattctttgcccagaagcgagcccttgaatacggtctttgagttatggtcgatgtaggtcacgccatagatcacaccggaatcgttctgccagagtatggcggcaatgccttttccagaaagttcctgcaggaatccctgacgggtgggctgtccttgcagggcggtagcgatagcttccttcgtctgtacgggtacgggatgtcgggcaattcattgtttgcttttcacaaatttcttttggagtgcctcgtagcctacgcttttaccgatcttgctggatttgatggctacgccggtccgttctcctttttcatcggtagccgcatagaccagtccatgataggtctttccctttatcgtcttgtgggcctcttccaccgttacatggaaaaggccaagcagggctttaaactccttgacggattggaacttgtatccctgcatgacgggcttgaccacattggctatctgatgcttgatatcccccttccggtaatcgacggcagtcagcggcagggattcccgtcgctccatcttctcggcgggtaacagatggtatttcctctccagctcccggtaaacagcggtcgagcgttgccattctttgtaatctttaattttctttccctgctcgtcaatacgcagggagacgatatggatgtggggcctgccgatatcctcatgccggtagatgatatagggttggttgccatatcccattttttccatgtattcctggccgatagcggtcaactgttcatcggtcagcacatcgtccgggtgtggatttaatgaaatgtggataacgggcttctcagtccggcggttagccgccagatacggttcgaaggaacggatgcagtgctggatggtcggatggccgtctgccggttccatgatccggtttcatgccagtggccgtgcctgctgcttgtccactttttcttgattgtagtataatgccccgtaaacggaggctcctgatgttatttttgcaaccattgttcaaattcttgggtgagacggataatctcccggttgagagatattagttcaatagtcagttgctccaatttatagagcatggcaagagccttcttttcggatagtccggtatgcagagctttgactgcctggttatagtttactccgatccggcggtattcgctctgcaggttggtcagcttgatgtagtagtccgttgccgccttatctattttcacgactttcatcggtttgtcgaaaagggcggcaaggatgaactgggatttattattagctcccgaattctcaaagagcctctcaaactcgatgttctggagttcgtccagacggaatccgtaataataagaatgaagttctgattcctctttgggattccgtccgcctcttcatttgctcgaagtgtcagcccgtccgggtttgcgtgtactattgattttagccatatcttttcaggttttatttatccggcagcaaaataagtgataattttgatacgaacctaaaatcggaaagtgactacaaatgacaagagatgactatttgtgacagggggtaaaaatacccctgttcacttcccgtttccgcaagccgcgatgttcttttcaaaggtttcctttagtttgggcagcaggacggaatagttctttttgcgccgggcaaggtcggcacgcaggtcatatggtttgggaatggcaacattgaagagtttctcaaaagcggaaacgataccggcgaaagagaggcgtttgccgctttcgtccgtaatcagcccgctgtaatccagcgaggagatcagttccatcaggttgaccagcgaacctttccaatggagcgatgaaagaaacgaggaaggtgtcgtgatggttccggggtactgtacaccaaaattgaccagctctatttccgcctccaccagcaggaggcatttgtccagatagaattcggctactgccgtgtggaaatgtcctgttcgggtgaataacttctttagggaaatcagttctaccttgctgtgaagcagatggcgcagcctttccgatacggaaaccgattcgatggcgaggtcgtaaaggtattgttcatattcggtataggaggaagagaattcttcatcggaaactgtctgttttgggcttgaagccagagataaataattgaatatacggcattctgtaaatggtttcatacggcatacatttgatttgtttataccggagtaagccaaatgaaatgcctctgctatcgtttaaagctctatacctttttaaaatactgacaatcaacaataaacaaatttcatatagaaacgggtgtaaataaaaagtgtaagccgtccttgacaagaatgttaggacggcttacacttttgtaaacctcatttgcttcgggttatcctccggtcagtcgatgatatggtatttccttagtttctcatacagggtagtccggctgacattgagcaaccggaccgccttggaacggttgtcacccgtcttttcaagggtctggagaagcaacgccttttctttttcttcttccgtccactgcgtttcttcttctttaggaagggagatttcaaggttcaggtctgaaacggaaatccattgctcttggcagatgagtacggctcgacctattacattcttcagttcacggatattccccggccagggatattccagcagtgccgcctctgccagccggtcaaagccacgaaacgatttatgggccttggcgcaagtgagtttcaagaaaaaataagccagaggaaggatgtcttcccggcattctgccagtgtaggaatccgcagagtgaactcattgagccggtggaacaggtcttcccggaagcgtccttctccgatggctttttccagattctcattggtggcggcaaccagccggatatcaaaagagtattctttcgtggaacctaccggcttgcagcgtttctcttgcaaggccctgagcaggagcatctgtgtcttataggaaaggttgcctatctcgtccagaaacaatgtccctccgttaacggcacggaacaatccgaccttgtcgctttccgcaccggtaaaggctcccttctgatgaccgaaaaactcggaggcggcaagctcatcggaaatggccccgcagtcgatagccagatacggcttgttcttccgatggctccgggcatgtatctcggctgcaatgtgctccttcccggtgccggaagccccacggagcagaacggagatgtcggcacaggcaatcatctctatcagacggtacatctcatgggctttggggctttcacctcggtagaactcctgttcgttatcgtttttatccagtatctccgttatcagagccaggagattgtctggctgcacaggcttacacaggtagttgatggctcccagttgcatggttgtcaccgcattctccacctgtccgtagttggtcatgatcagaaaagggatagagtagtacttctcattcatccatttcaggagcgaggtgctatttccgtccggcaggcgcaggtctgccagtattaggtcgaactccttttgcccgatggctttacgggcattcgcaagggttgccacgcattcggttttcatcccttttttcaccagccagttgctgatgctacggctgaacacaatatcatcttcaataatcaggattgttttcataggctttcctcccgtatttttcagcgtatactatcagtttttccactgcccggatgatgtcccgcatttccatggattgtctattggtccactctgtcgcaggttctgtcaccagttcccgtaaatgagacaaggggaaatccagacggacggtttcccataggggcaggttcttatgcaggatggaggaggcggcggcctccttgtcttgtcggtctaaggcagcggttaatgcggcaaggtctttccggctctcttcgataaacagggcgagcatttcctccctgttgtcctctcctgaaaggatgagtgagaaatcgggagcatactcctttctgtctttttctcctatcacttgtgccactgtatttatcagttcttccatagagaatggtttatggatgcagcccgaaaagccgcccgacagatactcgttgtcatcatccacccgtgccgttaccgctatgacggggattgtctttgcgttctccatattggatgcccggagcagttcaagtattccgtagccgtccgtttcaggcatctgtatatccgtcagcagcaggtcatatctttgtgaccgtagccgggtaaccagttcacggctggtctggcagcagtcgcaccgcactccgttacggttaaacatctctttggtaatgttcagttgcatccggtcgtcatcaatgaccagtacgttgattccatccagatgataatcagtagcgatgcgtgtctcatccatctgggtggattcatccgcctcaaggagtggcaggaatgcggtaaacgtgctgccttcacccggtttgctttttacggtaaggcttccctgcatcccggagaccagcctgcttgcaatggccagccccaatccgaaaccgggaacattacgggcattgtccaaccgttcaaaagctgtgaatatccgggttgtttcttcctccgtcatcccggtaccggtgtcctgtaccgagaaatgcaattctttattccggtattccgcttgcaggcggatttcaccttgccgggtgaatttaatggcgttggaaagcagattgttcaggatttgctggagctgggaacggtcaccgcttactaccacatccagaccggaaaaggcggttgtcagccgcagctttttctttttggccagcgaaccgtagttccgggctgtttcgctgaaaagggtctccagccggaaaatcgaaaggatgggtttgttcctgccggtatccagcaggtagaatccgatcagcgtattgaccagcccgatcatgtaatcggaagaatggagtatattttccgcatactcgtccttgcggctcttcttttcttccccggggagcagttcggcgcatcctttgatagtagccagtggcgcacgaaggtcatgagcgatggtgagcatcatgcgttttctggattgtaggagctccgtgttctcacgattggaggcttccagctgacgctgatactggtttatcctgttcagatcccggtggatgataagatacaggaggacggtcagcaacgagatgaggacagccagcagagagaccgtatggaacgagcggtcgcgtgtggaaatgaattgcctgtaacgctcatcaagccgtattccagcatccgcctcaaagtccctgacaatccggtgtagcctgtggttcaggtccgtgttgttactgtacaggaggtccatctgttccagcagcctttcccgttcggctttctgcatgtcggtcacctccctgtcaagggagtgcagcatgctcgtgacagatgtggtaccctgatgtttaccaatggactgtcgctggcgttccagctgttccttctgctgcagataggccgattttttcctcccgggcctgatgaatgaccagaaacccttcttcggagtttcctcctccttctttttctcggcaggaaggacatccgcctgctggatatgggacacgattgccggaatcttgctgttcacgatctcgccggtcttgcgcagacgcccgaacgtgtccatgaccgtgtctaacaacagttcctttctttccagcagcaggcataacgaatctatgcgcgactgttgttcgggagacttcacataccttttcagtgtctgcaacatgttacagacactgtctttttttgtgtggtagagtccaaggtcgctttcatcccagacgctggctgtttcaccgtaagtggccagtcccagcaagcccgcgtatgtttctccggccagatgccggatacaggccagttcatgctcatcctgtcgcaggctgttccgcctcgtctgttccttgcggaagatatgaatggtcaggacgagcaggagaagcagtatgacatatcctaaaaggattttaagtttcaaccacatggaagtcttcattcttatattggaatcctacaaaaaggcgtgttcgctcatataaaagggaataatagaaacttatgataaaagtttattactgtttcaaaccatttgaggatacctcgcaagtttgctatcacacagttgatcttttaatctttttttatactcacagaaaggataggaacctgctttttatgactgaaacatatcacatcccctttattggacattacattctcattcgatcatattgttttcatttcggctcatccgtttcttcacccgttctactgcttccgatacaatttctttgttttcaaagcgttgtgtataattggtatagtctggatgaatccgtttgtaggtcgggtcaagaaacaaaggactggaaataatatggtccgctgtcgaacggttacaacagaaaactatattttcaactcccgccagccgggtcagtgcctttacatccgtgtcatgtggctgcaatgtcatcggatccgtgaaaaagaacaaataatcaatctctccttccacaatacgtgagcccatttgctggtcaccacctaaaggaccggatttcagaatcgtgatatcccattctgtttcaggatgtttctcttcgagcgcttttttaatgagtgtaccggtggttcccgtacaatagaacttatgccctatcagacgttccgagttccaaagaacccattctatcatgtcctttttcattgcatcgtgtgcaaccagaccgattttacgaacaattgttttcatcataataataaaatatggtttatgtgataatataattaacaatatccaacagctttataaaaaacaggagaatgactgtatgagtttgagcagctccttgttcgcccggctgtccacggtggcttcccgcctctcctcaaacaaagtaagcgttgcggagcattccccgcagatatcaatgccgactacacgttcctttcgaaggacaattgccagtaattcctccagttcctgcaggctgaaagacccttgatcccagtctgttactgcggatgccgggttcaggacatccttgtctatggacaagtaaaccggtccttcaatatacgcagaggagaaattgcgccagcccttctcgtgagctaacgtcgcttcgctataaaaactgactcgttgtccgtattcttccggtacggtgcgtatcagtttgtccgatgcaccgactatcaccactttcttgcaaagcatattccagtctaacatgtcttttacccagctcccacaagaaagcatgcccttgaacaagggaggctgcatgtcggggtgatggtcgaatacaatcagagagaacggaactcgaagtttgtctgtccataatttggtcaggtaatgataattgcccgaatcaatgaaatggataccttccgctggataaccggcaatcacccgcttcaattttcgtatcccctccttgtcacagtaacctctcgttccagaaaggtgacggcagtctagccaaatgaactgattgttccgtgcaaatacctcatgggcatacacaccggtgaagttcatgatgacaaccggccagacggtttctcggtccgccttcttcttacaccgtccatttgtcagtaactcttgcttattcatgtccgttcagaaccatcgtacataacaaaaatcttgccggtgaggtaacaggggatggttgggatacattctgaatgcctgtttgaagcttccagcgctgaacattctggttattgccttgaaagtgtataggtttccgtctttggatgtcaaagaaaaaggaatgacctcatggatgcgatcctcattctcctcatgccgtataatgaccgattccaatccgatcgcgttgtccagccctttctcgtcaatgacgaccgtcatctcgtattccttaccagcctccaccgtggcgtccaatccttttcccgcattcacggaaacgatttccacggcattccatctgctgtcgacagctgccttccagccggcaagcgttttcgcctttgcataattgtccgccgccaaaacatgaaagtgttccgacaacttgttgtaaaatccgtcatagtagtcatccagctgtcttttcatcgtgaagcggggagctatttgcgcaaccgagttcttgatgtacttgacccaggtttccggatagtctttttctttccgttcataatataacggcaggatattatgttccagcaggaaataaattgtttccgcatccagttggttctggtactgttcatcctgataggtggccttgtcggtgatggcccatcccgcctccttgcggtagccttcgtaccaccaaccgtccagcacggagaagttgagtacgccgttcatcagagccttctcaccggaagttccggaagcctccgcaagacgggtgggagtattcatccagatgtcaaccccagaaataagatgccgtgccaggtccatgtcataattctcaaggaagatgattttacccaagaattcaggacggcgggatatctccacaatctgcttgatgagcccttgcccggcagtgtcgtttggatgggcttttcctgcaaagacaaactgtatgggatgttcctgattgttcacaatccgcgccagacgatccaaatcggtaaacaaaagatgagctcttttgtaagttgcaaagcgccttccgaagccgacaagaagagcattcggattaaacttctcgaaaatggagacacccaatgccgggtcaacctggcttttgagccagtcccggccgcatttccacttgatgtaggatatcagtttggttttcaaccttttccgcatgttccatatctcttcatcgggtatattataaacgcctttccatatttcctgattggactggtcgttcatgaaattctcatcgaaattgtccttaaacagctttttccactccgccgtacaccaagtgggaaagtgtacgccattcgtcacatagcccacatggttctcttccgggaaatagcctttccagagaggcgcgaacatctgctgtgaaacggacttgtgcagcttgctgacaccgtttaccgcctggctggttttgcaggcgaataccgacatgcagaaacgttctcccttgttgcccggagtttgccgtccgaggttcatcaactcgtcccacgtaatgcccagcttatcaggatatcctttcatatatttattgaaaagcccctcatcgaaatagtcatggccggcaggcacaggtgtatgcacagtgtaaagcgaggaagccctaaccagttccatggcttgtccgaagtccaggccttcggatatatagtcgcataaccgctggatattgatcagtgcggcatgcccctcgttgcagtgatatacatctttctcgatgcccaatacttttaatgtcatcattcctccgatgccgagcagtatttcctgcttgagccggttttcccagtcaccgccatacaggtgatgggtaatcggacggtcgaactcgctgttcagttcattgtccgtatccagcaggtagagggaaacacgtcccacattggccttccatacattggcatggaccgtgaaactgtcggcatagggaacatggattaccagttgtcgcccgtcaggctgcatcactttctctatcggaagctgcccgaaattctgtgggtcataatgaacctgttgctgcccgtccatcgccagagcctggtcaaaatagccataacgatataaaagccctacagcgcagaggtctacgttactgtccgaagcttccttcagatagtcacctgccaatatgcccagaccgccggaatagattttaagaaccctgtccagaccatattcatgctgaaataggcaactgacggacggctgtggtccggctccacatcaagatacgccttaaaagtggaatatacgttttccatcttacgcatgaagtttccgtcatgtgtcagtgcctccagctcttcataatccatccgttccagaaacagtaccggattctgttccgcctcttcccatagttccgggttcaaaccactatataaactcttcgcatcctcgttccaggtccaccaaagattatgtgccatctccgcaaatctccgcaattctgccggaaggtgtgaaccgactgtaatctccctccattgtgggacgtttacatgataacttgaatattccataacattttacttatttgatagttcatgatttttttctgtggaggtttctcctgtttccggttcttcctgtggaaatgtcccggctgtaccctggaaattctcgaggaactgtttttccatacttagcgatcgtttccgtatccgcttggaaaaatagataacgacaatgatcaggaaagataatatcagtcctgaccccaaagcgacattgaaaagacggatgatgatacccattacgataatgatacagatcaacaccttgatcactatcattgataccagcagccccctgttgaacctgttgtccgcccaaagtttgcggaattcgacggaattgtttttcttcatgatgatggcgcacaaaaacggggatatgataaggaggacaagaacgaagctcagcaggcttcctttcatccccggaatacgtcccattaccagaggatacgcataggagaagaacagcgctatgaaaaacaggcataccaccagataaagggtgacggataccaacatggacctgatgagcttgtgccaggagccttgatgtcttgtggtcattgttccagaagaataatgcgtcaggtaatctttcaggaattgtggcaagtgcctgtctgcaaaacagtagacgggatccgacagtcttatcatataaggagtaaggaaagtggtgatgaccgatactgccactatgaccggataaaggtatttgtccattacattcagactgattcctaacgaagcgatgatgaacgcaaactcacccacttgtgccagggaaaagccggcttgtatcgcaatctttagcggttgcacgatatgtgcgatttcttccgctttatctgtttctgccagcagggatcccatgacgaacgcacccagcgcggcggagaatcccgcctttgtcgctatcatcaccattcccaggcatagtcccagggaggttgtcaacagtatttcattgctaataaagcggttcaatcttttcagaagggtaggaatcagatagattcccaatgctgaccagaaaataagaaaggccgcaagtttcaatatgctctccagcatttcgaagccttcaaaatgcttgcctacagccaatgtggagaggaccaccatcatgattaccgccaccacgtcctcaatgattagtatccccaggacaataccggtaaatttctgatcgagaagccccatgtcactgaatgctttgaatacgatggcggtggaggacatggacagcattccgcccagaaagatacagctcgtgtgtgagaagcccatcgcattgcctgccgtatatcccaggaacatcatgccgcagacgatgataacagtggagaatatggccgaggctcccacacttatcagctttctgaacgagaaatccagtcctatggcgaacaggaggaaaataacaccgatatccgcccatatcttgatattggcctggtcggaaacagtcgggaatagggaaatggaaggacctgccataataccggccacaatatatcccactatgaccggctgtcccagccatttgaaaatgacggttatgataccggctataatcaagatagtggcaaggtctgatattaaaggggcaacttccgacataggagtaacattttatatggacaactcgttaaggacacggatcaggtttttgtcaatgggcttgtcgttcttgatagcctggtcaaaaggaacatagacaatctcattgttatgtatgcctaccatgatattgtgctggtcctccatcagggcctgtatggcggcctcacccagccggctggccaatatgcggtcgttggcacttggcgctcctccccgttgtagatgtcccaggatagagaccctgacatcatatccggggtattccctttttacccggtcggcatagtgcatggctccgccattcttattgcccgggctttccgtcacgatgacgatgctgctgttcttggtcttccggaatccgcgtccgataaaagtctccagctgatccgcatccgtccggtcttccggaataatggcggcctcggctcccgaggctattgcgctgttctgggcgaggaaaccggcgtcgcgtcccatcacctcgacaaagaaaattcggtcgtgcgaggtggctgtatcccggattttgtccacacactccacaatggtgttcagggccgtatcatatccgattgtaaaatcggtaccgtacaggtcattgtcgatggtaccgggcagtcctatgcacgtgacagggtattcctcggcaaatatgcgggctccagtcagtgagccgtcgcccccgatgactaccagcgccccgattttttctttcctcatggtatcgtatgcctctctgcgtccttccggggtggtgaacgcttcggaacgtgccgttttcaggatggttcccccacgctggatgatgctgctcacatcctcggtcgtaagttccctggactcgcccgctatcaggccttcgtaccctctgtaaattcctttgactttgaagccgttgaaaatggcggtacgggtcacggcacggattgccgcattcattccggaagcgtcccctccggaagtaaggattcctatatattcatcttttttcatctatctcagttcttgttttgtttcattctgccaatatagctttcagttttttccggcagtgaaaaatacggctctttatggttcccaaactcacaccggttctttccgctatctcacggtatttgaaccctgacaggtacatctcaaaaggtatgaaatgcgactccggtatacttttgatggcattacgtatcttttccaggtcatagttcctgtccacctcctctgtacgggactcgtccatgatccgcgaataatatgcaggatcggaggatatgtacagacgggtatgaccgacctccgcccggtaaccgttgataaacgtgttacgcatgatgataaacagccaccctttgaaatttgtgttcttgttgtaactttctttgtgaagcattgccttgagcagggtatcctgcagcagatcttccgccttctccctgtccgctgtcagtttgtacgcgaaacggaacagttcgtcctgtacgctaagcagctctttttcaaaattgaattccttcatcggttgtgccggttccctgttccggaagtgcctgttaaaggccggacggctctccggacaggaaaagcctgtccggccttacaccattccagatatggaattatttaacctcgatagccttggaagttttttgtttttcttcctccttcactttcgggatttcaatggacaggatcccgtgttcgacttttgcggaaatcttatccttctccacgttttcaggtagcaggatggtctgctggaacttggaataagagaattcgcggcggagatacttcttgtctttcttctcctccttcttctcttctttcttttccatgcagattgtcaggttgttgttttcgtcaacattcaccttgaaatcatccttcgtcattccgggagccgccatttcaaccttgtagtccttgtcattctcaatgacattgatggcaggagccgtaactcccgtttttgccagccactcattctcgaagaaatcgttaaaaatactcggcaaccagtttgaatttgtttttacaggtaccatttttacctccttttttaaattgttaataaataaaatattcaaaaagacaatacaaatcagtctgattgactgactcttatcgtctgatcataccttgttcggctacagcctccgtccgtctccgtatctcctcctggtctccgaggaaatagtccctgacaagcaccggccgttcatcaaattcgaatacataaggtactgccgtgggcaggttcaagagggatatgtccgtatcggaaatattcttgagatgcttgactatcccgcgcagactgtttccatgggcaacgacaagcaggttgtccctatgcatcaatgtgggtaggatgacacattcccaatagggcatgacacgcatgacggcatccttcagggattcagtccgtggcagttccatttcgggaacaccggcgtaacgggtgtcgttccccggatagcggggatcgtcttccttcaccggctcgggcgacacgccgtaacttctccgccagatatggacttgttcctcgccatatttgtctgctgtctcccttttgttaagtccctgaagtatgccgtagtgtttctcgttcaacctccagcttttctccaccgggatccagtcttcattgagacggtccagaacacaattcaacgttttcacagcccgtttcagataggatgtgtaagccgcctcaaaagagaatcccgcttctttcagcatatcaccggctttacaggcttctgcgatccccttatcactcaggtctacatcggtccaaccggtaaagcggttttccttgttccataggctctcgccatgtctcaacaatacgatccttttcatgccatatagtttttatgcaacggttatcgaaggatccagatagacatcctgaatggtgttcagaagcgagaccccgtctttcatcgtcttctggaaggcttttctcccacagataagtcccatacctccggcacgtttgttcaccactgcggttacgacggcatcatgcaggtcagatgtcccatgggactcgccccccgaattgatcaggccaacccttcccatatacccgttggccacctggtagcggcagaggtctatcggatggtcggagaccagttccgtatacatacgcccgtcggtcttaccgaatccgatggctttaaaacctccattgttggacggcagcttctgcttcacgatatcagccttgatggtgaccccgatatggttggcctgccctgtcagatctgctgccgcatgatagtcaatcccgtctttcttaaaactgctgtttctcagataacaccacaataccgtggccatccccaactcatgggcatattcaaacgcctgtgagacctccacaatctggcggcggctttgttccgaaccgaaatagatagttgcccccacggcaacggcacccatgttccatgcctccttcactgtaccgaacatgacctggtcataactgttcggataagtcagcagctcgttatggttcaacttcacgatgaaaggaatcttatgggcgtacttacgtgccacagctcccagaactccgaatgtggatgccacggcgttgcatcctccctcgatagcgagtttcacaatgttcccgggatcgaagtaaagaggattgggtgcaaaggatgctccggcagaatgttctatcccctgatccaccggcaggatggagacatacccggtattggccagacgcccgtgcccgtacagggcttgcaggctctccaaggtgcgtatattcctgtcggaatccacccatgccttgtctatcatattcggctcggggatatggatgagtttcttgtctattgtcttgcatacatggtccaggtagtatcctgcctgcgttcccaacaaatcaataatcgtgctcatgtcagtcgtttttttattccaaatcaggactggcgttcccccagttttgcatccatgaaaaggatgccgctctctccggctttcttcatcaggtttacgatgttcaggaaattcgcctcttcctccacctgctccctgacaaatccccaaagaaaatcacgggtggcattgtctttctcctcggaagccagatgtaccagttcgtcaatcaatctggaaacatgtctctcgtgttccaaggcatgttcaaagacttcggtgggactgccccaaccctgtggaaccacatcgaccttgtccacttttgcctccgcctcacgtttggccatatattcggcgatggcacatgcgtgtcctgtctcttccgccgattgcttgcgcatccagcgggccatgccggaaaaaccttccttttccagatagaaggacattgaaagatacaggttggcggaccataattccgcagtaatctgcccgttcagggccttttgtaaattctcggtcataatgaatctaatttttaatgttggtactattttttatttttcatattcaggggcaagcgtgtgcttgtctcaaaatatctgtcaggacaggttgcatcccgtttatgaaacattccacggcgatgaccatcagaataagccccatcagtctcatcatcacattatttccggtttctccaagaattttcaaaagccgcgttgacacgcaaaggataatgaaagagaggagacagactagggcgatcacgcaaaccagtgcaattttgaaaatatgctcaggggcatcttccatcagtgttatgccgcttgaaattacacccggaccgcacagcatcggaacggcaagaggcgtgacggtgatgttcctggaatattcttttttctcgttctcgttcagtttcacatgggtgaagtgtgcctgcagcatgtcatatccgattttaaagatgatgatacctcccgcaatccggaaaccattggtcgagatcccgaaaaaatggaacaggaacctgccgcacaaggtgaaaagtaccagtatgacgaacgtgagggcgcaggattttaaggcgatgctccggcgttctccggcactcatgccctcggtcatctgcaggaaaaccggcatcactccgagggggtccatcaatgtgaacaacgaagtgaaacacaacattgagtatgcgaatatatccataggatgatacttgttttatttttagaccattattttctctgtgaacaataaactccggtcaggttacacgatttgacacatcatatgaagcagggcagcctgcgttcatattccatggccaggatacgcaacaattccataaacgccgtacttacatatatccgttttgtgtacagccccttgatgaaagaatggatggatgaatccgtattctggcatagtacgtgaagttcggatatctgacgggatatatattgttcatgttcaagcagggtgttcaaggcagccagcggtgtcggccattgccggatgtcgcgcctgatttcatggatggttacagcacctccttcatgatagatgcggttcatcatctgatagaccttgcccatattgtcctgtgcctgtgcacttagccatgaggccaatatcggaagttgctgcccctcaaaatagacctgcaatgacaggtacaggttagttgaccagatttctgtattgatcaatgtgttcatcgcatattcaattcgtttatccatggctgttctgatatttgaaattagacaaaataaatcgtaattcatatcctgcaataatcatgaatttatgtgatagcatctgtaaatcggactcttatggagttgtaaaatgaattttaatgcttgcgagacaaatagtcataaaaatgtataattatcatgcctttttgtcacaagatccctacaacattctcaacaagatatccagttctttctctatcatgttgatcttgtcgtatatgtaatccagcgtattatgatagtgcaggcaggccctgcattcctgcaattcccttgacagggagagtatttgttgccaaagttcctcttctgtatgtccagggggattattgaatgccataaatggattcagagaaactgtttggcatgtaatttgtgtaataatagccgcaagtcccgaaaaggggcaggaatggaaacaaaaaggcagagaattccactaaagacagtaacagacagaggaatgaaaacggaaggcaggacctgtccggttttgaaacaaattgctttcataatgcgattatatgacaactctgttccctgaagttgtgtttatataaagttaagcgtgggaactttggtattaccgttcagaagtatccccatactcaacaacatataatacacaaagccccacgcctatatatgctaacaagatataatagtgcatagggacacctgatgtattatccaattgttgtcttgaaattggggatttcctgaacatggataatgcctaacgcttactgttattaatcttttttggtaaaagacaaggcaaaaatactaaaagaattgattcgcgtcaataaaaatccaacttttttattattttactctctgcgccactgaatttcatcgctctccgctctccaaatcccgtgcccttcagcgataagtaatcctgagttcatcaattgcctcataaaagagcttttgtacatcctaaaatccgcaacctgtaatatttttgatatctggggttgcagatacctctctaaaacgactcgttttcgtaaagaaccctaatggtgcagtcgcaagagacaaaatccccttaccccatgatgcgacttgaggcaatacgcaaaaggccacgaagatttgaggctacccaaaatcaaatttgaaggccatcatgtatgcatcattgcttgtgtatatgttcagtatgtgctgtcttgcagtcttaatccattttgcagggacagaaacatacttgaatacaaaagttttgattctgcttgtgcgtttaagtccaaagctcttcatgtttgcgtcagatatgaggtgtctgtaaaagtttcgtattaaagcggtcagaagcaggaacaccgtgttttccgccatgaacgattttggcagccgtttccagccaaagccgttgttcatgtcgtccaatacacgctcagcaccgccacgcttgttgtaatactccacgatgtcacggtctgtcgaagtatagtcatttgtcagtatgcatctgtatgtatattccccttcccacaggtcgagttccttgttgatgcttctttgccgctgtatgacaaggcggtacgctttgccgacccatttctctgcaatgatggagcatatctcaaactcgtgaccgtttatgtattcggtcttccatccgcgcaaggcaaagatatcgtcatacaacgatacacacctgtttgcgcggatataaaaatgccgactgtgcttctccaccatttccaccatagcctcagagcatgagccacaatccatcctcgcacggtttatatgtattctggcattctccaaacgctcaaaaatacgttttagagtgtcttcctgatggaaacggacattggtattgccgtcgcggttctctatcccgacgatgacatcgccgaccgttgctattcctggactgtaaccggtaaacttcttgtaggttatttttgcgtcaaatttctccgtctcaatgaactggtggtcaaaatcaaagtcatattcattgtctggcagcaactgtccagttgccagcaatgcattgacaagcagattgttaaggtcggaagccacgttgaagtcgtagcttttgcccgaatcagacctgtaggtcagattcggtgtggtcaattcacgaatggccctaagtattgtgtctgcgctgcatgtacggaggggtggatgcaagcaaagtgcttccataaggtgtgaggtcacgtcttcgacacatgaccctccacagaaatatacgcacatcagagaacgtattatctcgctatattgatagccatacactttgctacgcaaacctaaagtagagtctattgtacaagacaacatcctgtcgaatttctccataattggaaatataccaccaaaagatgtgagtttctcggattttatttgtacttttaccatgcttgatgaggttttgtttgactatttttgcaacactaagttaagtgaatcctttgacatgacaaaatcctgagccgctcggctttgccgcttggcttgtccaagaactttttgttgttcaggatattataaaagttaaaatttatagtgttgcggaattaaggtaataacaatactatgaaatcgttattcatattacaacttgtatgttgcgtcattacagccatgctagcattgcaattagccatggcaagtttgcaggtgagatggaaggtgtggcgctacgaaatatcaagatggattctcgttgcatccatgctattcttctccgtccactacctcttacagatgattcatggactccgtgcacaaggtaccgatgtgggcgcagcattcaacatattgttctatactccagtggcatttgccatcactctctccataatcaacatagagagcacaggcaacaaagtgcgacggtattgtttacgtggtatgatggcatacatactcatcgccatagttttcgtcattggcatgttcaaaagtcaaagtttacacattggcaatatgctctatgtgatgctcggtctttttgtggctagcatggcatattttattcttatcattcgcaaagaaacaaaagcccgaaagcagaagctcatggagaatttcggaatcgacttgattccatacgtgcgctattcgcaagccagcatcattttgctatactttgctgctggactccttcctgtagcaatcctcttcaataccttattatatataataggtcccttgatattactctctgtcatctttttcgtccacactttcattgctatgggctattacatcacacccaaagaagtcattcctgaggaaaatgacgcagaagcaaaagtcacggaagcagaagacatgaaagacggcaagaacactcatggcacaaatatcttgacagctaatagaaagatggaaatagaattagccctcaagaaatggtgtgaagagggattttataaggactatgaagttaacatctattcgctagctaccaagttgggatacaagaaaaacgaactgacagaatacttcaatcagtcagaatacaccaattttagaacctggcttagcgacattcgttttaatgaggctgttcgcatgatgaaagccaaccccgaatatagcattgacgctatttccacagagtgcggtttctcatcccacacatggatttatcgtatattcaaacaaaaaacgggcatgtcacctagccaatggcgcaaacagtttgcctccatctaaatgcgtatttttgtaatttcgcattaaatagcatttaaaagaggtgtgtcagcgttttgacacaacctctacttaaaagatttaatttacaatagtattgcggaattaaggtacatgaaaccgataacctgtcatagtggcattgggaaaagccgttcagacgatccgcatcatggtcggcaaaagatctaaagtgacctctttggctgtcttgcgcttggagacatgaatcatttcaagcacctttatgacgtcttcagacttcgtgccacgtatcatggtcacaagtgtacctctgccaccacgtcccgcacgattagtgacaacagtatataattctccgcagcttaaagaagtctcgtcaatacaaaggctagggacctgaggttgtgcccgcattctgacacatttacatttgtagtattaaatatcccaataaaaatataagtgtatattgtaatgggatcttaatagaggattaaaaaataaatacttaatgggctgtttcttatgaattctactgaaatcttataataattgctcaaaaaatcacattctttgtatacgtaatatcctaattttggaacgcaaattaaaagaatattaataaactaaattatctgatttatatgacaaaattaagatgtatgctttgttgcctgatgatctgtactattactattgatgctaggactgttaatgatatatataaaagaatatctgcacaagtctccttgaaggttcccggtaatcaatcacgaaactattcccttgcttttcaaggagccgttgatgataagggaatctatctgttagagtctgaagaaaaaataccattaatcattacagagagaatagaacgtgacaatgttaaatgtgtaatggtagtaagtattacggcattggaagacgtgtactttaattatcaacaacagttgaaaacaggcttccgacataatgactgtatgttttatctaccaggattctggtatagtcgcaatttacgttctcctaaaggtgctccttcatttcatatatcagagagttggctggtacgtgaggatcgtctgagctcaccccttaccggtatcttcaatcagaaagatggacgttatatgactgtggcacgcaaggacgattttcaatgggatgcccttgctacccaccaaacaggcgaaatcatcctctcgggcaaaacgtccctagggttcaccggctttgagagccatgacggaacatcaacactatcttttggatttccttaccgagaagctcctaaaacctatattcgtaagttgacgctggctccggaggttacatctttccaatatctaaaaaaaggagaaacagtactcctgacctgggaatttatcgaggggcaggctacagactactcagattttatttgccatacttgggaatattgttatgatacataccgtccccaacctgtgaaaatacctttttctccagaagagataaaaggagtgctgagcaattattttgtggaaagttttgttggggacaaagctcttgcctattactccagccctgaaatgaaagtggcagcctgtgccaacatgaatgtagcagagataggttttgtcggtcgcgtacttctaaacgctttcaatgcatgggagtttggcaatgagaatggacgtgatgaccttgcagctagcagtaaaaagatatttgatagttacttagaaaatggctttacggaaaccggttatttgcgtgaatgggtaaatctggaaaatgatagtgatgtgaaagaagaacgcccagtgcatagcatacgtcgtcagtcggaaggaatttatgccatgtttcattatctgaattatgaacagaagtataaacgtcaccatcctgattgggaacaacgcttaaagaaaatgctcgatatgttcttgcaactgcaaaatccagatggaagttttccacgtaaattccatgatgactttacagttgttgacggaagtggaggaagtactccatccgctacattacctctggttatgggatataaatattttaaggacaaacgctatctgtccgctgcccggcgtactgcggaatatctggaaaaagagcttatatcaaaggctgactatttctcctctacgctggatgcaaactgtgaggataaggaagcttccctctataccgctacggcaacttactatttatcattgataacaaatggtacggaacataaccactatgcctctctgacacgaaaagcggcttattttgccttgtcctggtattacgtctgggacgttccgtttgctcccgggcagatgttgggtgatatcggtctgaaaactcgcggctggggaaatgtctcggtggagaataatcatattgatgtatttatttttgaatttgccgatgtgctccgttggctttccaaagagtataatgaacctcgtttctctgattttgctgaagtcatttctacttccatgtgccagttacttccttataaaggacatatgtgtggagtgataaaagttggttattatccggaagtgatccagcacaccaactgggattatggaaggaatggaaaaggatattataatgacatgtttgctcccggttggacggtagcatccctttgggaattgctgacaccgggacgtactgagaatatactgttgaaatagctctgatatccacttttcaggatattcttatatcctgttgtatgttaattaatgaaactaacaattaagacaatgcagagactacgtattttagttatattaatacttctttctttgatgcctctttattcccttgccgttctgaatgaaggacaatatgcattccgttcacttgatatcaataatggattatcccagaatacggtccatgccatccttcaggataaacaaggatttatgtggtttgggacgaaggatggtcttgaccggtatgatggtatctcttttcggactttcatgaaagaatccggaaccttgggcaataatttcatcacttctttgtatgaagacaatcttgggcaaatatggattgggacagacgtaggcctatatgtctattgcccacaaatggaaaaggtcaggcattttactctgataagtaattcaaacatagatatagactgtacggtcaatctgataactggggaccagaaaggaggtatctgggttgtaactcagacgcggggaatcttctattacaatccccaggatagccagttggttaattatcagtcggacgggtccggtactctgaaccttaaaacttccggccaactctattttgattcggacgatgtctgctggttggacatacgtgatggaaatctgtattattcaaaagacaagcttaaaactttaactccgatttttccagaagattcaaaagtgtctttcagagatgaatacatctataaattgctccccggaccctataattgcatgtatgtgggaactgtattcggactgaaagaagtgaacctaactaataagactatccgtacccttctttccaaggatgaattgggaggtgatatttatatcagggaacttgcattttattcagatgacgaattatggataggaaccgaatcgggactttatatctataatctgcacacggcaaaaatcatccacttgcagaacgtcaacggtgatccctattcaatctctgacaatgccatctattcgattctcaaagaccgtgaaggcggaatgtggatagggacttattttgggggtgtgaattattacccccggcaatatacctactttgataaagtctatccccagaaagaatcaaacaaaatgggaaaaagggtgcgggagttttgtgccgcccatgacggcacactctggataggtacagaagataaggggcttttccattattatcctagtactggaaaaatcgaaccgttcattcatccggatatttatcataatgttcacggattgtatttggacggagattatctgtgggttgggaattttgcaaaaggattgaagcgtattgatttgaggacatacgctgtaaagcactatgataatattgcaagtgatatcttttctatctgccggataactgcgggcgatctgtatcttggaacaacaataggattgtttcggtacaacccagatacggaacgttttaaacgcgtccccgaacttgggtggacgtttgtttattatataaaggaggataagcaggggaatttatggctggcaacttatgccgatggcgtctataaaaagaatgtccgtacaggtggttgggaacatttcgtacatgaggaagcagactcgtccacccttccatccaataaggtgctgagtatttttgaagacagtcaaaatcagctatggtttaccacacaaggaggtggcttctgccgctttgtgccttccgccaacacctttgtccgttatgacggtatcggtctgccaagcaacgtcatttatcggattgaagaagatgaaaagggattgttctgggtttcaaccaataaagggctggtgcattttaacccgaagaattccagttttaaagtgtatacagttgctaatgggttgctgagtaaccagtttaattaccagtccagctataaggataagaatggacggatttattttggctgtattaacggtttcatctcctttgccccctcctcctttattgataatgattttttaccctctgttttgattaccgattttatgctctttaataaaaaggtggtagtcggagaaaaaggctctccattgaaacaaagtatcactttgtcaaaccatatcgaacttcagtcaaatcagaattcgttctccttcaggatagctgcgataagttatcagtcaccgagcatgaatacactgctatatagactggaagggtatgattccgaatggcatacagcgggtaagggccctattacgtattccaatttaccttatgggacatacatgttacgcgtgaaaggtgcgaatagtgatggtgtatggaatccagatgtacgcacattggggatcaggatattgcccccgttttatttatccgtatgggcatacctgatttatatcctattgatactcggtacatttttcgccctcttcttttatttaaggaagcgtactattgaaaagcagcgtaaagagatggagaagttcgaacaggaaaaggagcaggaactctacaccactaagatagatttctttacaaatgtggcacacgaaatccgtactcctttaacactgataaagtgcccattggagaatgtacttgctgatagggaactctccgaaaatgtaaggatggaattggaaattatggatcagaacgtggagaggttactgaacctgataaaccaattacttgatttccgtaaagcggaaaataaaggttttaaattgaatccgaaagaatataatatcggtactatcgtccactctgtttataagtatttcaccactttggcaaagcaaaggggaattaaacttgaagtagaagttccagaggaagaattgttggcttctgttgacaaagaggctttgaccaaaattctcagtaatctgtttgctaatgcattgaaatatgcccggacatacgtttatctccatttgtctgttgatgagaagaatgaggtgttcactatctctatgagtaatgatgggaatatagtccctatcgaaatgcgtgaaaatatttttaaagcctttgtccaataccgggacgggaaagatattgtctcgggcacaggcatcggattagctatggctcgttacttggcagagttgcatcaaggtatgctggtgatggaccgggagctagattgtaaccgtttcattctttccattccaatattacaccagacacttccggatgattcggaagaacaacataagaaacctgggtatgatgatgaagatcgtgaagtttctgataaagataaaagagaggttgcttccatattggttgtagaagataataaggatatgcttgcttttgtgttcaggcaattgtcttcattgtatcatgtactgattgcggaaaatggggtcgaggcgttggacgttcttgaacagaaatctgtggatctgataataagtgacattatgatgcctctgatggacggggttgaattatgcaagcatctgaaacaaaatctggactatagtcatattcctgtaatattattgacagctaaaactaatctggaatcaagaatcgaaggacttgaagaaggggcggatgcgtatattgaaaagccgttttctatggagtatcttcgtgccaatgtagcaaatctgttgagtaatcgggaaagattacgccgtcactttattgaatttccttttatcaaagcagatgcaatggcgcagacaaaggccgatgagatgtttattagcaagttaaatgagtatgtattacgccatcttgataatacggacctgcaaattgatgatatagcggatgcaatgaatatgggacgttccaacttttaccggaaattgaaaggaatcctaaatatgagtccgaacgaatatctccgccttttccgtttgaagcaggcagcttccatactgaaagaaggaacctatggagtggtggaagtctcttacatggtagggttcagtaccccctcctatttttcaagctgttttaaaaaacagttcggagtactgcctaaagatttcatatcgcactagtaatatgtattttgctttaaattttataatatcaggtcattttctgatattttatccgagttgttccgggtaattttgcaaatatattaacaactaaatttgatgtatgacaaggtatttacttttttttgccagccagccttcgggcggaagagagagttgttttcctatcgtatatataaacgattcttagtttgagaatttgtactgtaatttatataaagtcaaagaaataattataaaataaattgcacacacaatgaataatagaaaagaaaatgaacagagttgtatagtaatgaataaaaaagagggtacatcgtgcattacgacacacctccctgtatttcagagaaaaatctacactactaatcaaaaaatctattgatatatgaactgtaaagtaaaacaaggatgccttaccagcgaaagctgttgcatcctgttatggttagccttcacattatttcccgtttccgttgtaacggcggcagataatagaaagatcgacgagagccagcaaaaagaagtaaaagcagaaatgaaaggatatgtgggagacgaaaacggagagcctgttattggagctaccgtattggaaagtggaacgcagaacggggttataacagatgtggacggtatattcactatacagttggcaaagaacgcatcattgaccatttcatatgttgggtaccagaagaaaacggtagtggtaaaagataagaagttcatttccgttaatttgactccggacaggagtatgatgctggatgaagtggtcgtggtcggttttggcaaacaaaagaaagaatccctcgtgggagctgtgcaggcagtgaagccggaagacctgaagatgacatccagtaatcttagtacttcatttgccgggaacgttccaggtatcatcgccgtacaaacacagggtgaaccaggctctgatgaggcgaaattctatatacgtggtatatcaacttttggttcgaatacctcaccgctgatcatacttgacggtgtggaaatcaacgctacgatgatgaacaatattcctccagaatctatcgcgtcgttttctgtgctgaaagatgctacggcaacgtccctatacggctcacggggggctaacggagttatcatcgttactaccaagcaaggacagctttccgagaaaatgtctgtagatatccgctttgataatactttctccatgcctacctatgtgcagaaaatggcagatggcccgacttacatggatatgtataatgaagccgtttataatcaggctattgccaataaccaagagtatgagcctttctatagccgggataagatagataaaacacgtgccaatgcaaatccctacctgttcccaaacaatgactggtacagtatgttgttcaaagacttcgccgttaatcagaatttgaatatctccatcaagggcggaagcaaaaatgtggattacttcctgaatgctggaatcttctatgaaaatggtatcatccggcaacccaaggaagataagcttgatgtgggtatgcgcaacaagaaatacctgtttcagagtaatgtgacagcccgtgttacctctacgacgaaagtggggctaaatatgaatacgcagttgttctaccaccatgcccccaaaacaagtacccggaatttgttcgcctattccatgcatgggaatcccgtacgttttcctgctacacttcctgctgaaccaggggatacatacatccgctacggtagcaatgatccgtgggatgtgggaaaatcagagccgaatccttacgccaaattgagtgaaggttatacggaacgaaattatgtctatatgacgaccgctttcaatctcgaacaggacttgaagtttgtcacaccagggttaaaactcaccggactggcatctttctataattacagttttaactggctggatcattggattgtacctttctactataaagtatctgatgactatacgatggatgatcagggaaactacctttataagacttcgactatcggtgagccgggagaaccttatctgaagagcaattccgggcgtgatccgacagagagtgtctggtctttacagggagcgctggactactcacgccagtttggtggacatgatgtgggagctacccttgtttaccacatgaaagaaaccaagaaagtgaaggacggcggagctgaaaaagatcttcttccttaccgtgagcaagggatggccggacgtctgacctacagttttggtcagcgttacctgcttgaggctacctttggttataatggctcggagaatttcagaagcgggcatcgtttcggattcttccctgcgattgccctaggatggactatttctaatgaaaagtttttccaaccgttaaaaaaaacagtttccactctgaaaatccgagctacttatggattgaccggaaatgatgcgcttgccactcgctttccctatgtaacagaagtcagtatgaataataatttggattggtggactggtagcggtacccgcgtgaatgggccgcttgtaaatatttatggtaatgcgaacgctacatgggagaaatcgaaaaagctgaatttaggtgtcgatatgacccttcttgaatctatggatataaccattgattatttcaaggaagaccgtagtggaatttttatgcaacgttcgtccgtcccttcaacaatgggagtgacaggtatactgccttatgccaacattggctcggtaaagaataagggtgtggatatgagtgtagcatacagcaaagtaattggcaaagattgggtgctccgcctgaacggtagtctgacctatgcacataatgagattacggagatagacgaaccggtgaatgtagaaccctattcttcaagaatcggacacccgataaacagtattatgggatatgtgtctgacggattgtttacttctcaggaggaaatagacagatctcccaaacagtcgttcggaaattatacggtgggagatattaaatataaagatctgaatggtgataacgtggtgaatggttatgacaggacgattatcggcaatcctgaaattccggagattatctatggttttggaggaacgttgaagtataaaaagtgggatttgtctctgtttttccagggagtggccaaagtcagtttaatgatgagcgatattcatccgttcagcgaagcgggccataaaggatataacattgcacagtatatcgttgatgaccactggtcggaaagcaataatgtagccggtgccgcctatccccgattatcacccgaatttatcacgaacaatgcgcaaaccagcacttattacctacgtaacgcagctttcctgcgcctgaagaatgccgaactgggctattccttcttcccgtggctgcgtgtgtatgcagcaggtactaatttgctgacattctctccgttcagtacctgggatcctgaaatgggaagtgggaatggtttgaaatatccgctacagcgcacggccaagatcgggattcagtttcattattaattaagaacagaataagttatgaaaaatatatatacaaagttatgcctgtcggcaatcggctgtttaatgatggcatcatgtgattttcttgatgtggttccgcaaggtactgctaccgtggatgatatctaccggacacaatatcaggctgaaggaatggtactgtcttgctacgcgaatatccctaactatttccatccccaacaatttcctgattttaccggaggaaacgaaatcataacgagcaaaggaggaacaacgcgctggtttcatttccgcagtctggtttatggggaagaatccccaacaacgacttattactcattatggagcaatacagcaaaatcttatccgcagggtgctgtgaagaaagcagtatgggaaagtatccgcaattgctataatgtgcttaataatctggatagggtatcggacattacccccgaaaacctgagctggtggaaaggtgaagcgctgtttttgatcgggtattatcatcagatcatgctggagtactatggaccgatagttattattgacaaggaaataccaatggaaagttctccggccgagatgatgacctcccgttctccttatgatacatgtgtcgatttcattgccaataaatattcggaagcagctagattacttcctggcgtatgggattcaagtaagagaaacagggctacctcttctgctgccttggctttcaaggctcggctgttgctttatgccgcctcgccgttagtcaatgggaatagtgagttttattccgactttaaaaaccccgacggcacttttctgattaaccagacttatgaccgggaaaagtggaagagagcgatggatgctgccaaagaggccatagacctttgcgaagagaacggttacaaactttatggaaattcgaccaatgacttggagcaagggaagaaaaactatcatgaagcctttgtcggtgatgggatcagtggtagcggatttaactggaatgaagtcctgtttggctttgctgaacagggaactatttcctactgtatcaagaatatggctcctcgtgttgaatttacaagttattcgaccaaaggttttagagggtccttattcccgacgtgggattgtgtgagtaggtattataccaagaacggtctaccttgggcagatgaccccgagactaagaagcttgatccgtattccattgcaccaggtgatagtacggtacgttttcacaggaatcgtgatccgcgcttttatgcctctattggctttgatcgtggaaattatgacgtgcagggaaagacaatagtgctcaaatgcagacgtggtgaaatgcagcagaataatggcaatgccaaggatgagtatcaaacggacaacggttattattgtcagaaatgggtgtctaaatatgatacctataataggactaccgatcaaataacctacaaccgttggtgctttccttatatgcgtctggccgaactctatctgagttatgcagaagcggatttcgaatatagcggcacactgagtactgccagtctgtcctatttgaataaagtacgtgaacgttgcggattacctacctttgcagattcatgggcaaaagccggtggtattccttcaggagagaagttgcgcgaaatattacatgatgaacgctccattgaattggctatggaaggcagacgtttccatgatatgcgccgttggaaaattgcccatactgaaatgatgcgttatcagaaatcctggacattatccggaaaaaccgctgatagtttttataaacttacggacatgaaagaaaccggcgttcgtaattttaccgctcccaagaactattggcttgctattccacaagatcagatagaagtaaatcccaatctagtgcagaatccgggatactagagaatcagctcttatataactaacaattagaggaaaggacaaaatgaaaaaggtaatgtgtttattggcaattatgtttatgattgccaatacttcggcacaaacacgggtgattgcccatcgtggtttctggaaaacccaaggatcagcacagaatagcattacatctttgttgaaagcggattctataggatgttatggttcggagtttgatgtctggctgacaaaagataatggtttggtggttagccatgatgggattattcaagggcataaggttgaagagtccactctgaaggaattaaccgggttatggttagcgaatggagaatgcgtaccctccttaaaagagcttctggaaacagctaagcggaaaacatctttgaagctggtgctggagttgaaagctcatagtaaacccgaacgggagataaaagctgttgaagagatcgtttcgatgataaagaagatgggactcgaaccccggatgatatatatcaccttttcgtctcacgcattaaaggaactgatccgtcaggctcccacaagcactcctgtatattatctgaaaggggacttatctccacaacaactgaaagaattgggtagtgccggaccggattatcacttctctgaattttaccgttataccgattggattgaaagttgccatgccttggggctaaaagtgaatgtatggacggttaataaaaaagaggacatgcaatacttttgggataaagtcgactttatcactacagatgagccgttgggactgttgaaagatataatgaaggtcaaatagatatattttctgagataatgtatagtccaactgattacctttaataatctgttgattatttatgtttttggaaaatgagtttcaagttttcaaacgactgttcatgttgatacagttgaatgctgattgaaaacaaaacaatagcggaaacaatgaatgtcaatcttgtataagaaggcaaacgtccaaatttatagttcagctccattaatcgaactgaataggggtatttattaaataatataaaattagccaactaattcatagccaaattattgcgaattagttggcctttttgtatctttaggtattccgtgcgacaagaagtcgtacaagtaattgttcagcactgtgcctgaacctattgttctgtcaatagtagtctaaagaggcgtgctttaccagtcatggtttagtgcgaagccctcttgacaatgcagtcctttacagaaatatccaatgtataggctgttaggctgactgatatgagtaacatatgtgaatcgctacaccatcgtaataaagaaatagcttacggatatttataagctatagccaaaaggtgggtagtcaggatagtcttttgggaatgtaaggctacacggacatcatactggcggtggaggggcgggctctaagtcgggcgtcagttacttgtacggaacttggtaaacccgtatttctcctgtctatgtcaggcaggtaagccaattgcaagaaaagccgaatgtggtgcgggtaaaggattgcggagaaagtgaatgattctgtgtaatgcggaggatagaggtttaaacatcaccccatgcgaaatcaggcagacttccgcagggtaattctttgtgaaacgattgtagaactttaataaaatgaagaaactgcaaatgagcaaggcaaaagccgagtgtgcatctttaaccgtacgaaacacgacatgaaaagatatcgattcttccaaatatgagcgtaaagtgagaaaactgcaggtccgaatagcaaaggcccacaaagaaaagaggtacaacaaggtaaaggccttacggtacctacttgccacttcctacgaagccaaggcattggcgataaggaaagtaacttccaataaaggtaaacgtacggcaggggttgaccatatgaagtgggacactgatgccaagaaaatagaagctatatgtttattgaaaaggagaggatataaggccttcccgctgaggaaggtcaacatagccaaagcaaatggcaagacaagatctttgggaataccaaccatgaaggacagagccgtgcaggatatatcttatggctttagaacttataactgaaagtgaagcggatgcgaactcatatgggttcagaaagtttagaagtactgcggatgcaatagacgcacttcatagatggttgagtagagactgtttaccacaatggatactggaaggtgacattaagggttgttttgatcatattaatcatgaatggcttctcaacaatgtgtagattgacaggctggtattaaggagatggctgaaaagcggagtagtatttaattgcaaagtatcaatagatacgctacactttttcttttcgttggcaaatcttaatccgtatcttcgttgcatgaaagaagatatacggatgcgccaaaaatggcttgagctatacgtcgaaacgggttctgtgacaaaaactgcccttcggtgcgggattacccgttccacgttataccgttggataaattgcgagaaagaacaaggcaagtcggaattgtccgataagtctaaacgttcatcaagacttgccaatatgaagataacacctgaaattgaaaccattatccttaatctgtgcgtgagacaagaagatggggagcgcaacggattgccaactatctgcttaggaagagaataaagctctcaggcatgacggtgtggcgtgtgttgaaaagcatcaggtcaaagctgttgtgaaacgttgcgagaaatttatttcttcttccagccgattttttccatcggcaacatccggataaccatatacccccgccgttgttcatagcggcaggaaaaacatgcctgacggcgatacgtgacgcacggcactcaaaccctctattccaacgtgaaactgaccgcagagagggatgccgccacgggcgacctcgtgtggaagtccaaggacaacacgacacttgtggggggattgtcggatgagcactactacctctactatccctactaaacggatatgagcggaaagactgccactcccacaggctcagccttgaccgacacggaattcttcgccccgttggtttccgcttggcagcctcaggacgaccaaagtactcatgcggcatataccgcctccgacttgatgactgccgaaggctccgcaacgacaggggaagacaacaccctccacctctctttcaccatgaaccatcgtatggcattggccgtcatcgagatgccgaataccgttaaatacaagtttaccgacgagaggattcctgattacgccgtgtcacccgccactacattctctggcattgcccagccgctgcgcgtgaacgatggtacataccgctacttggtgaatcacgcgactcccgcaccgactatcgaaggacattatgacgagggaagcaaggagttcaccataaccccgtccggcctttctaccggcagttacaagagatacaaggtggacggcgcggtgacaactgtaaaggactacacgatgcaacggggagattacctgctcgccgacggcaacctgctgcctaagggtactaccctgaccgaggagcagaaggcaagcgtggcggccatcgtcttctggacaccggcagagaccaatcctgaaggacggatcacgccggcgtctctggatttcgacaagattatggtgaaagaacatcccaattgcacccatggccttgccgtgtcgattaaagatgctccgggcaacgtctcgtggcaaaacgttaacgactgggtggcggattttcaaagaggaacagatttcaatcctgtcgataaggatgagtacgtaaacattgccactggtttcgatgcgaccggcaacataaacaggatactcggttaccagaacacgaaagtgctgtgggcgtataacggatattgcaagacaaacggcaaaaccgatgccttggtcaatcctgctgaggtcctgaaaacatttatcgcaaataatccagccccggcaaacagcaccggatggttcttgccgtcggtaaaggaactgcacatgctatgttataaggatgtcgataatattgcgtacacacgggacaacacagagacgagggatatagtcgaagtctccatctccgccgttggcggtgacgcattgtcaccgcgcaataaccataaacgtttctggtcttcttcggagagccccagtaataagaatggcgcttttagcgtgtatttctacaatgccttcgcacagctcagcgaaaaggacggcgcactcaatgtgcgtgccgtgtgcgctttctaaccacataaaacaaagaaaaataacgatgtgaaaggaacaggatattccggacgatggatgcgcatcagcggctggtagccgatgttgatgctcgcgggcgggctactcgtctcttgcggcaagatggaaacgggagaatctactacacgtttacccgatggcaagtacccattgcgactgacagcggaggtggcgcaaccgcacccccgtgccggcggcaaggagataggagtgatgctggatggcatgctcagcctccaaaggtacgtaatggacgcctcgggcaatactgtcccaaaggatgctgaaaacaccatttaccggaagagcactaccgagacatgtgtcacggcacggactccgaatgccgatatcgaccaaagtggcgggtatgccggcttcggccttctatacgtcaccgtagtgggaggttatgaccaagccgtcagcctccgtttcaaccaccgcatggcaaaagtagagttcacgctcatggcgggcgaaggtgtcacggaggaaaaacgaatgaaatagacgtggtgcagacggtgccgggcaacacctggattgatggcggcgaggagaatgtggcggtagccaaaacaatacactacactgccgatgaagtgaaggctggggactacatctattcgggcaggagcacttcggacggcggactgcgcaaacgctatcccaatgggaaagctcaggtcatcgcagacccgaagccgcaatccgtagcgggcaagacggtcgccggtgtcgtcttctgtataccgaaagacactgaccccacaggcagactaaccccagcccgacttactgatgataagattatgatgaaagattttccgaatgccgaaatttggaattatatagtcaacccatccctcgtcgctgccggcggtccgacgccaatttataccacctcttactggtcgtctacggaggcatattatagccctaacaatgcatatgccatacactttccagatgccactctggaaagtaatgataagtacttataaagttaggtttctggccgtgtgcgctttttaatcacattaaagaaagaaactgtagcaaagcattctacattcgattccggcggcggtgctcctatcgcttgccgcctgtacgcaagaagagctcccgggcaaccaagacaaggcgcagcaacttactttctccgttaccgatggtggatatacgtcggctgttcgcaaaaccacccgtactgtggagaatggctgccaaaccaagttttccgaaggcggggcctgcggcctatacgtggtgcggggcactcaaacagtctattccaacgtgaaactgacagccgagagggatgccgacacgggcggtctcgtatggaaaactgaaagtccgacaccgctcacaggcgggctgttggacgaacactattatttctactatccctatcaggcacgagcctcaatactggggcagggcggctgttcgccttcatcattacggtgaacgagttaaccgtgcccggcttgtcggtgcggagcgaaacatacaccatctccgacaataagacctgccatatcctggagtctgtctgcccgtgatgttatcctctcatcgaattcctgtactcactcgggctcattccatagtacttcctgaacacctccctgaaatatctgacatcggagaaccccgagtcatccgagatttccgttatcgaacagtctttttccctgagcagttgtgccgcatattgcagccgcatggagcggatatagtcagccggggcatggccggtgagcgccttcaacttgttgaaaaatccggtgcggctcatgttctgcatgccacagagcatgtccacacagaaaccggggttgtcgatattcttcatgacacattcccttacggaggccatgaatttccagtcccgggtattgtggcagtccggcggaacctgtccgactccgtcctcaagaccggcgtatgcccgtttgagcagtgcccggtttgccagtatgttcctgatattcgccctgagcacgtttatgctaaacggtttggtgatataggcgtcagctccgttttccagcccctccagcatgtccttctcatctcccaaggcggtcagcagcatgaccgggatatgggatgtctcaatatcggatttgacggacgcgcaaagttcgtcccctcccatttcaggcatcataacgtccgaaagtatcaggtccggattgtattctctcgccacaagcagcgcgtcccgtccgttggaacaggtttggaccaggtattcctctttcagcagcccctcaaggtaggtccgcaaatcgtcattgtcctccacaataagaatacgctgccggtccccgccggtcattgttggaaggatctcacgcatggggccgcaatccggtcccatgcgggtttccccggtatcctgtttcctgggcgaagcaacggggcatgccttgtcaaggcgtctgctcctcaggggaaaaataacacataccatggtccccttcccctcggtactggtaacgcggaccctgcctccgtgcagccttaccagcctatgtaccatcatcagtccgacaccgtttcccgccacttgcagattgacggcattactgcccctgaaatggttcctgaacagtttcttccgttcctcaggtggaatgccaatccccgtgtcttccacttccacaccccatacatgccggtccgcgaaggcacggacctggatactcccgccccgtggagtgtacttcagtgcgttggacagtatattcttcaatatagagtccattttgtccttgtcaaaccggacattcaggtaagggaagccgctctcacgggtgatatcgatgtccctgatggaggcatatgtgcggaatgcctcacaggtcgtctccagataactgttgagctcatattccgagacatgaagtctcaaggtgtagttgtccgtactctcgaaatctatcaggctggtgaccaatcccagaagtccgtccacgcttttcagggccatccgtacattgtccatcccctccgccttcaccatgtctttctccaccacctcttccagcggagccttgatcagcgtaagcggagtacggacatcatgggcagtatgtatgaagaagcacgtcttttcgtctgatatccttttctgcctgcgcaacatggcaacgcgaaaagacaccaccccagccaacacacacaatgacgcatatccggcaatggcccatgtacccgcccacagcggccgggcgacactcagaccgaggcttctttcctcatacaccttgtatttctcctcattggagacggcacggatacgcagggtgtagttgcctgggggcaggctcgtgaactgtatccgcccgctctggaccggatggctccagccctcgtagagcccctccaatttccatgaatataggatgttcgagggatagtcgtagttgatggagacagcttccagggagaaggtattctggtcatatgcaagttccagcctgacggtattgtcaatatcctccctcaagggggatcccttgtccccgggatagacggggcggtaggagatcatgaaatcccgcaggagcatccgagaaaaatgcggggcgggtatcctcatgtcggaggggaacatgacggctccggtgttactcccgaacacgaagctttccccgtgccggaaagtggataccccggcattgaggcatacgcttgccagcccttgttctgccgtccagtttctgaaagtgccgctctcacgccggaacagggccacgctgttttcggtccccagtagcagggtgccgtccgcacgggggacaatggtatggatgttattggatatcagggcgcagttctcggtctggtattggcggacgaacctgtcctccacgctgtcatagacgagaagtcccgccccgccggtgccgatatacaggagcccgtccggtgcctggtacagtgcatagacatgaaccgcctcgactggaaaggcgatatgtctgcaggtccccccgtgcccgtcaagcaggtacaaccccatgccggtaccgatccacatccattccggagccttctccagtatggcggtgatggggcccgggaccgggtacaggcgtactgtgccgtcatggggatcgaaacgtttgagattgtggcagccccctgtccatatacatcctccggaatcttttccgatgtcattgatatactggtctggacgcccctctgctgcaaaggaggggggaaagtattccaccctcccggttttcttttcgatcctgtacaggcccgaagcgtacccgccggcgcagatgacacccggcgagacctcgcagagcgtcaggaagatatggttcccgccatcctgtatcccatcggaccggctgagaaaggagcgccaccgtcctaccgcaggctgcagcaggctgatcccgttgctggtggcgaaccacaagtcgccttcgctgtcttcgatgacatcatgcacctgatcgttaaccagcgaccggctgttgcccggtgagtgccggaaccattcatagctctggtagcggttattccggattgtgactccggcggggtagttggcaagccagatacggtccccgccatccacataaatgtcattgatattgtctccgttcatgccgttgtggctggcgtagtcggcggttatatagggtttgggcactagcgagtccatatccatcctgtataccccccttccgcccgtggctatcagcagctcccggtcattgagaggggtgatccggttgacggccacattccgcagcgtactgcctgcggacactccgtatacaagtatgcccttcctgaaggttcccacgaacagtttcttcgaaccggggtggtagtagagttcgctgaccggcgtccggatgctgtccgtgtccgcaagcgcctcaaggacaccgtccctttcccgtaccggaaaaagtccgttcacggtaccgatgaaaaggtttgtaccgtccgtctcgctgatagcggttatatcacctcttaaacgggagaccagccgctgcgcaatgcctgtgcgggtgtcatagcggatgatatggtcaccctgacagagccatatgcggtccccacggtccatataggcgtaacagagcatgcccgtggcgaagtcatcctgaagaccgggtatcctgtataccatccggaaacggtcatggagggtgtcgtaatggaaaatacggcctttccttcccacaacccacagcgtgttctccgtgtcggtgtagagccagttcagattgacttgcggggccaccttcagattgccgtcaagaacagtgtaatgcctgatccgcttgccgtcataacggtccatcccctcctgggtgaggaaccacatgtatcccctcccgtctttttggatacggtaaatcctccggttactcaatccgtcctctattcccaagtatttatatatctgggctccgcacatggaggaaattcccagcatgaggaatgcggacagtattcttcccatattccgaacacgtgtcattctgatgtaaattagacaacaactgttgcaaatatataaaaatataaattaatatacaaatttaaacataacctcggatgtcggcatcaggcggtatgtcctcaatgtcatgtaccccggaaaatagctgcatacgggaccggcccatgatatgaacatattccgagaggcggttgttcaattgacccgacggaattatggcttgccgggctcgggactgtccgcaagggtacgttggtccggtgtgcggaataccatccatacctccggtccgaatttatatccgcgggtggtacaggtgccggtcgaggtttggcagcccccaataaagcgggccgaattgtttgtaagcactcttaccctcatgcccgatttatagataatcttccaacagtaagaagttataattcgcatttaagaacaatggcgggcatttcttgttaatattataatcatataaaagaggcgcatccgttagtgccagatttgttcaccactttcatcgttgcgtatcgtattgcgagttgtccgtatcagatgtttatcccctctttcttaagacttcctgagaactgcctgggaaaggacggctttccgcattgcgacttcatccacagcccttggcggtatagccatgcctttcacggggactacggttgattcatgcgacacagcagattccggtgctataacagggttgcctacatacttgtgcctcttttcagcttgctgtccagatccgagttgcgcactttacccgcaggttggacggttgtacataacaatattgatctttttgggggctaaaagtcgaatatccccttaaagtaagcgcctgagtaagtacatcttctacagttcattttccctccttacttttgctgcaaaaaaaataatatcctatgatgcagcgacgtaaacacatgatgaacagagaaaaatttatctccgttcttttccgtcagcagcagagtggtttgtccattgctgatttttgtgagaatgaaggttatagccgtagtagattctatctttggaaacaaaaatacggtataacggagcgggagttattggcagaagcctcccgcttaggggttaaagacagctttgtccccatagtaatcaatggcgacacgccatcccccggtatatctcacgaggctcccctgccatctccccagcctagcgtcccctttcccttgaaaggaaaggacagctctgaaatatccttggaattacccaacggattgaagttgaagtttaaagggtcttccggctgtgaagctgccctgaatctgatctctaaaatatataatgccaatgttctgcctaaatgacagcatgagatatttcctgtgccccggttatacggacatgaggaaaggtatgttcactctttgcggccttgtgcatgagaggatgggaggcgacatcagaagtggggaggtattcattttctacaaccgtttccggaccaagataaaattgctccatgccgaaccgggcggtctggtcctttatgagaaactgcttgaagaaggcaccttcaagatacccgcctataatcctgccacccgttcttaccccatgacctggagtgacctggtcgttatggtggaaggcatcaatgaagatgtcagcaaaggcaggcaaagacggctttccaatttgaaaaagcattggtaaaacagttgtaaacaaacagcttgaaggcttgtttttcttgttgtttttgactatctttatatcatcaaaaaaaagatattgaatggcaaaagaagatgcaaccggacaagctgtggaaccctcaatggaacagctgctggatatcaaccgtaaacagagtgagatcatctcagcccaggcaaggaccatagaagaactccggggtacgatagttgagttgaacgcctccctggcatggctgaagaggaaggtgttcggaaagatgagtgagaaatgcaagcctgtcgataacggagacccgaagctcccttttgactatggcgacctggaacagatagaggcggaaatcgaagatgcccggagcagggcggctgaacagattaccgtccccaagtcccgggccgccaataaaacgccgcgccgtaaccgggtcgtcatggataaccttccggttgtaacagtcgtcatcgaaccggagaatgtcgatttaagcagatacgtcaagataggcgaggaacataccaggacccttgagatgaaacccggctacctctatgtgaaagacacggtacgtcccacatacgccctgaaaaatgaaatggaggccgttgataacggagaaaaggctgtaataaccgctcccatgccactgatgcccatatataaaggtatgccaggggcttccatgctcgctgaggtccttttacagaaatacgaatatcatgtcccgttctaccgacaagtgaaacagctggaacatctgggtgtgaaactgtccaaaaacacattggacggctggttcagaccggtctgcgagcttctcaggccactttatctggaactcaggaagaaagtactggccgcagattacttccaggttgacgagaccacgcttccggttataaaccacgacaggcataaagccgtaaaagaatacatctggatagtccgagcggctgtgccgcgtctgccttcttccattacgacaacggatcgcgttcacaaaaagttgcggtcaggcttttgaaaaacttcaaaggatatctccaaagtgacggccatcccatttatgacgcctttgaggatggggaggacgtatgtctgtgtgggtgtctcgcgcatatccgcagacatatagagctgtgcaaggaagaaaatctggaatatgccatgcagggactcaaatttatccaggatatgtataatgtggaatacatggcggataaacaggaactcccgtatgaaggacgtgctgaattacgccaacgtctatccaagccgatgcttgacagctttgaactctggcttaaaaacacataccctaaagttctaaaacgaagtcttatgggaaaagccatagcctatgcctactccctgctgccaagaatgaaaccgtatctccatgacggaagaattttcattgacaacaatcgctgtgagaatgccctgaggccactggtcatatcaagaaagaacatgctgttctgcggaaaccacgaagcggctgagaatacggctataatctgttccttgcttggctcatgtaaggaacgtggtgtcaaccccagagagtggctgaatgatgtgatcagtaaactcccctattatctggctcccaaatcagacagagacctgaaggaactgctaccggatgtatggagaaaataatcaggacagttccgggaaaatgcaggaaaaaacgggaaaaagcgagactgacactcaatgacaaccctgagataagttggtatatggaaattgagatgcacttacaatggagtgcatcccactgaaaaattgaatgcacaagatgtagttgagcagtcgcttaccccttaaaaacaaggagctgacgcatgtgtacagccccttattttttgtatagcccggcctcctctggcatattgccgttgcttccatctgtaacaagcaaaatcagaatctatatgcggaactttttgttcccgtagctgagaaagtccttcgtggcatatttcacactgaatggtccgtagtcaccgagagccgaatgcgcaatttgcttgtccggttctgtcacatgctcgacaggttctcccgtagtatcagtatccttgtatgacataggctgcatgctggcgatggctgacccggtagccgccgcacgcaatttcctgaacgcattggagaggattccgtccatcattgaccagtacaaggcgaagaacgaggtgcaggaaaaggaggtctcacagttgtaggagatagccgggaaggtatggaagaaggaggacgaactgaaacagttgaagtccgaacttgcagcactcgaccgaaagatacagttggagcttgagccgcctacgcccgaagtcgccgaaaaggagaatgacggacaggaggtcaaaccggatgcggaaggtgtacgaaacgtatctccacaacacaccgaagatgtgccgcagatacgcagctcggtgaatgaacgcagtccgtctggcaattttattgccgaccacatcatcatcgggcggccgggattcaacgtccgtgacgagtgcaaaccgaaaggtataaaaatgtgaacgagtgtgcggatatatatggcaggattgggaacataccattccttttcctgctttttccatcaatatgacataatggcaaggataccatacaacaagccctcgattatatcaaaatagggtgttgaaagtaaatcgtcatggcaaatccgccatatattcagtattttcgctaattttgcattcaaaatagttaggcataataaaatggaaccatctatatacagttattcactttgtattgcgctaccgttgatgttgttcttcggcttttattttttgttggctccaacctcggaaaaagccattttcaataattatctgcgttcccggcgaattatgggggtagccatactgttacttgccgccaactattcggtacatttcttttttggaatcaggttcaagaataccgatgccgccatcctgatgaacctgtccacctattttttgtgctactggttgttcagttcggccctcaccactctgcttgaccgcttttatatcaccaaacgtcggttacggacgcatatctgtctatggatactgttttccatcctttccggcatcgttctgctgttgttaccaaaaggtggtttacagacaacggtgatgtttgccttggccgcatggttggttatctatgggctgttcttgacccgtaggcttctccgggcctatcacagggtcatccgcattttcgatgacacccgtgcggacgacatcggtgcctatatcaaatggctttccattttcacctactgggctgtcacattcggggtgggatgcggactgctgacattcctgcctgatgaatacgtctatatctggattctgtcatcggtaccgttttacatttatctcttcctttgctatctgaactatctgctgttttacgaacaggtggaaaacgcgatggaagatggcatgacttctgaagaggaagacctgtgtgacaccacaaaccgggaacaggcacagaggcaggatactccttttttccatgccgaaatagcgaaaaaaatcaaaggttgtatcgatgcggacggttatatccggcccggccttaccataaaggagctttcagatgtgcttcataccaaccgtacctacctgtccgggtacatcaaaactacgtatgacatgtcgttccgcgattggattatcggacttcgtatagaatatgcgaaacgtctgcttgcgcgatatccgaggttgacggttgccgacatctccgagaaatccggttttttgtcaccaagccattttataaggctgttcaaggaaaatgcgggctgtacccctaaatggaggaaaacagaggcggaataatacggtgtgttatggatggaggaatagcccaaacgacaaaaaatagcctaaactacaaaactaaaatgttctaaaccacaaagatgtgcgattctgacaattgagacaatttttataggcaagaatcgggctgaatttaaatcttttcgcttattttgcacttgtcggttgagcctgcgtcatctccaaaaagagtaaaacagggttttatgggtgattttaacgtgtgtaaaagaaaatgctacccaaataacttcaaataaagacaactctatttcaagcggcaaatgagttctacagcttgaatttgaataatacaaacaataggattctcctttaaaaagtcatgaaaaagattcatttacttcattacttattgttgtgctacatggttcttgcggtagctacatcgtgcggcgatgacgaggatgactacgcccccgacaatgtaaatgatcccgagaaactaactgatcctttgcctactaccgaccagttaggcgtaacacacaacaacacgctttattacctttcgttctggagcaaagaagaccatatgatatccgagaacatgataaaccgttacaaggaggcggttccttatgctccgggaaagaagatggaggttggcgacgcgttcttctttacccggcaggacattgaccggattcagtcggataccgatttgctggctgacatcaaggatatgttccataagcggagcatcgtgatgatgatggagggaggaacgaacgaggattttaataccgtctgcacgttgctggattgctataatccttatgcgaaggaagatgagtcttattcggacgaactgccgctgtgggtattttctggaccgcttccgtcggcgagcggattctattccaagctcaatgcgctcagtactgctaccggagctgatggcaaagaatctgtacagacgattaatgaatacgggcagggatttcattgcgacatgacaagtcaaagtttacaaagagccctggaaccgaaagctccgtcaaacggttcgtcggatttgaaaaacttgatatctgcctatatcgttatcggtcaaaatagctataccgcacctcctgttcatggacatgaaggtaaagggacaaccgataattttcaagtagaagctaagatatggaccgcttatagcaaagaccggaaagaacatttttatttggtaaatctgggttttatagcctatgtagaaccttctttttatggagaatggcataccaaggtcagtactctgaaaatgaaagggtatggcttttgcctgactgacgtaaatttggaattcgctccggttcacccgaatggtgccattattcatgcacattccccgcaaactacagaacgccagagctcttataccagcagtgtctctttcgagttaggaggaagtgtcagtgtcactggaccagagatttcaggaggaataagcatttccaatagccatacggaaacaataaatgatattgaagttatcaatagaaccaatccggcccaaggaagcccacagcttaggtggtagtttaatttacgcgaaccttcttcacattttaatatgttttgttacgcgtcgagtgctgtcaatggaggtgctaaggccgggataaccacttgtagcttgtccacagattttattatttctgtacctgatggagctgacaacgaatggaaagtaagcatgtatccaacactgaaaacatatttctttagtgacctttttggattccatgatcaatatgaaacgctatttgatgatgcggcagaaagctggattggcatcgaaaaagtttttaacttgccgactgtcgatctgaaagatgaatgatttgttacgttgatattaataatttctaaagttattggattatgagaaaaacattcttggtgatgagcaggcttatcgatttatttgtggatatcttgcctatagatgagcttgggtttaaacatgtcaaacttcaatcagaagggagaccaccgtataatcctgcaacattactaaaattgtatttatatggttataagcactcaataagatcatcaagaaagttggaacacttcctgtaaagtaaatgtggaattatggtggctattaggaggcttaatgccctcttttcggacaattgcttatttaaaaaaaaataatgcggaggcttttagaaaagtctttaggcagtttgtccttatgctaaaggatatgggtctgatagaaggcgaaaccataggtatagattctttcaagatatttgcccaaaatagtctcagaaacaattatacacaaaagaagatagacagacatcttgaatatatagataaccgtattgaagaatttgaagtagctttagataagactgataaagaagaagaaaaagaacttcttaaatctaagattaaattacaacaagacaggcgtaagaaatacgaaactcttgatacggaattgaagaatagtaatgatactcaaataagtctaacagacaaagattcaagagcattaatgttaaccaataatgtatcaggagttgaatatgcggttcaagcagcctttgatagtaaacacaaattattggttcactctcatattggagcatcaactgataaaagagaactatcaacagcggcattgaccgtccaggaactactacaattagattcgttcaacacacttagcgatgccggttatactagcggcgaccaactacaagcctgtaaatattcaggaatatgtacttattcatcgcctatgccatcaacatcacctaattcgaattccataccactggctgaatttcattatataaatgacggagattattatatctgcccttgtggagaacaaatgacaacaacagggaaatggagaatccgtcccaattatagatcaaaagtatataaaacatcagcttgtgtaaattgctcaataagagaaaaatgtactcaaaatcaaaatggcagagtaatagaaagaagtgaatatcaagatgtaatagatgaaaataacgccagagttatgaatcatctgttgcaagggcgcgcagcagacattcgtaatgtcgcacaacttccgcctcttcaccgccctgacgggaactgccacagccccccaaaaacagtccaaacaaaaagactaaaacagttgatcgtttcatggtgctgtttgtttaatggttaaattactggtcatgcacacaacggacactaccgcccagcagataatgataaccataatattcattaaaccctgcaggtaacccggccggactatgaatgtcattaccggcaccatgcattaaggcccatctattacgattaaccctatatgtgggcgctgtttttccagctccgatatcaggattccaatatattcctgtatgtaatacagaggcaggagaatgtcgttgaggtgatgaatatatcattggagtttgtgtccagatagctaaaacgccttcttcatatccaccatcgggggcagatatggctggaaaagacttagctattcccgcaccgctttctatcaatcgagtaaatacaacaggataagagcctgttatagactgtatcagattaataacctcccaagccgtagggagtcgccagccatcggggcaggcacgttggggaatactgccataataaatgggtccgaccatagctggtgccaaagaatatgaacgaggacgagcagccatattaggacctccttccctactggcgtctatcatccaacaaacaccaccattacccatacgggtagtctgatagttactgccaccgatacgcataagtttcatggaatttccgaaaccacaagccggttgctggcttacatgcaaacgatattccaattcgttagcagaatttcctgttcgtatggaaaggacagcactacgcatattctgggtaaagttcttactgtttgccgaaatagtaaccgtggctggtactcccgctgtacccgaggtttggctgagtgaaatccatgaaggttttccggttatttgccaattggtattctctgtagttatatttacgggtaatgaagcgacacctatttggatatcaccgtcaaaagcgaacacccgtttgtccaccgtcagccgtttgttccctcgtactattacttcttcttgtacctcgttccacggcacgatacggcatttaagggtatggtttcctttgaaagcttcctcgggagtttgggccggcaacccgtccacactttccacttgtactttatattcatgattacgcagaatatccatcggcactcccgaaccgtagtccttgaagtcgaggcggtagtaaccgtctaccgacggcttagagccggtgagatacggcttcacgtgcataaccagacaaaggtcgtccagcgcattcccgcccgaggggcggttcttgttgtccacctcgcacaggtagaacgtcttttgtgagccgttgaaaataccgatattcccgggtgacacatcgctgttcaatgaggtgaatgtaccccgtgtctgccgtgccccgacgggtacggtgggagtattcacttgcttgcccgtcacattatagttgtccggtgcaatgcgtccttttgcccggtaattgtacagccgcagatcgttgtaataatagaaaaagccttttaggtcggattcaagaggattgataagcgtgaacttagctaccgcacgtatcatcgtcacctcttggggagcgccagagggagagaaaccttcgcccaccgcttggttgggaagctcgccccacatgggtatgccattcgtaaagtcgggtgcggcatccgttccgacatcgaatgccaggcggttcattaccccctctttctgttctccgaatgcagcagcaagggtattcacctgctcacggacattggcaagcaccacgagtgtctgatgttcgggagctcccatcagctgtacacgtacggtttgtgtgccgatatcgtatgtaccctgtgcacggtagaagaatgtacctttctttatattcgtaggatctgcaggatcaaccttgaatgaaagtacatctacagtattgattccattttcatctatagcacgtgtcagcggcgcacgcgtttcggaactttgcgaggtgttcatttcagcagcctgttttgaagcaccggttttaaagttcaggtaaataacggctgtatgtccgttcgcttgcggcaccgactgctccgcatcatcactgcaagcggtcggaaggagcgccgccattgcaatccacagcacagctgaggcatgtcgcctccacagatatgccacacgggtgaaaccggataaaccggaagtctgaaatcctatattcatttttcttctttttttagtaatatatctattttttatatcaactttcttacaaactaaattgcatcggtcatataccgtcttacttatttatcggcgaacagacgaacggaaaacccgtggtgtttaacgtctctgtagttcgcgaacgcagagtacgagtagaaagacacgttccaagcattgccgaggaggctgggaaactccgtgctcgaccaatcccgaccatattcgcctcgggcttcgagcaaaccactcgaaatgaacgttgggaaggagatataaccggcagccggaaaaatacgaacgacagcctcggaagtatggctatcccaccaagaatcattattgatagtgctaatgtttcctgtaaatgcgctgcccaagtaaacacaatccactttcaatagggaagtaaagtcatggttggcaaacgaacccacgcgggtgtaacggtaagcacaaaccatattattatcagtagcaagagggaaatcggatagggaagaatcatcgataggattaccggtaccttgtttgaaacgcagagcgtaacaaacaccgttacccgaagagaaataatcgttggcgaaagtttttttgatgccaccgaactcaatagcctcgttgacattagaagtattagtaggggaatcatattgggtattaccgctgtaggagaaaacgcccgtcaactcccagcgggaaggcaggtggtaaccataaccgggatgccccagtttaaaaaagacatcatcaaagagcttcttggcatttggattgtaagtatcattattctctcctgtgagcacgtaccaattataataaccggattgggcattgctatggctcgaagcccaatgaagattagggtcagtctgggctgcagtgggagaaatacccggaggaacggaagaaatgaaaggagaattatagatagagccaccggcgaggttatattcggcaacataatccaaaggcgtaccgatctgcttaatattgattttagtataaagtcgtccagcccgtatctacagataaccatccttgaatcccttgccattcgtgatggcctgcaattcctccgtaaccggattggtgagagtggcgccagccgccccactgttttgactgggtttcagccatgaattagaaactgaaattgttgttccgtcggcattataggcaccgaccttccacccactggggtaattggtgcgcacagaaaatttgttctgtgtgcttgtggcatcgtgcttgccttgaagtgtcatcgccgttcgggtcactgccaagaaatgccccgattcattgaacgttatatctgtgaatgcgtctatcacgatgggcactactacgatgttatggttggtaaagttgtccgggctggttacagcctcgttcaaagtggcaaaccccggccctttcacttccttgatggtgaaaatatagcggtggttgcgcagaatgggcatgtatttacccttttcgtaaggactcgtgccaccgcccttgataccgtcccatgtataatccattcagtagtagtattctcttccttgataggcaagatttataactatacaaggacggctgccgccggagatagccgactgttcattcaaataataagtgatgacattcggagatgcggtgtttgcagttccctcaagcgggtgcccgccactgactgctggctgcgatgtggcaggcagtgtgggagtcatgtatcccgactgtgaagcggtggtattgtatgtagcaagatctacccaaacgcgtccgttgcctacggaattgacgaagtaaacctttcccgcagctgtcgtggctcccgaagttgtaggattgatgatatccaccttcgccagcatgcggataagcggtatttcctgcgcaatggtttgcgacacaccggctttcagttcaaagcctcccgccggggcatgctcgccgtacatgggtatgtatgtgcccgtaccttcttgtccgaacctacccacgacttccacttgcttaagagcatcataggtggaaccggctgttatatttgccagttctgtttgggcattagctatgagagctatacgtttgtatctgcccgcaataacgggcacagagaagtatttcgtatccgaagagcctgaaagtgtatgcaacgagctgcccagaatatcatatttcaccttgactttctccgtaccgccttcatcggcaaacatcagtacggtaatctctgttatccctttctcgtctacaccacgagtattcgccgcccggaaatcgggaatcctgacagaaagtgtcacttcggccgtctcacctttgccggacacgggcggaacaggaagaatgagttcgtcttgccggcacgaaagtacgagcggcagtaataacaggaccgacagcaggttgcggaacggtatgatgattgaactacttggcataatatattgttttatgatttgcatttcatgattgaccggtgcgttttttacactcctccgggttttacattctgattttcccaattcctgatcgttattttcgcatgaccgtttgtaaaggtaatctcgataggaatggttacttcaatatcttcctccatcggtatgtggtagcgggcaataagccctgccaacgaaatcgggggcacgatatggtttcccgtggtgggatcgataatttccaccatgccgggggtatcggccttgaaacgggggatgtcagtcgtggcattagcatggcggttggtgacatcatatgctacggcaggctggaatgtcttgttccggcttacggactggagacgccatgtgcccgaggtttcgtcgaacaccggtcgcaaggctgactccatgcccgtgatgtgtaccacaggctgcacgctcacaccatcaaggtgaagacttacacggatagtgccggggctgaaattgacagtatggtctccagtctcgtgctcactgaccgtaagtggcgtgacagcgaaaagaagccgatcaagcgtggggatggaagcggaagtctccgcatgcgggtgtgaggcggaaaggttccttatggtttctccttcggaaaagccgccgagcttggtctgtgcatccgaagcattcgcccagagcacgacagtgtagtttccctgcggcagatacatctcaacaccctgcaaacggtcaagttcactcttctccagcgtctgcatatgctcaatactgccatcgggacggtacacacacagcctcaccctctgaacacgctctccgaaaaggtcagcggcagagccgcgaggcttgtaggtaaatcgtaacagggtatccagagggcagccctccagggactccctgatgcacctcgacaagactaaggttaaaataccggaaagcatcaggaagcgtatagctttatacaatttcatgcgtagtatcttttaggtgaataactgtggttatgactttatatgaatatacgtgttatgatttaacaggttatagaaatacaggtcgtgaggtcagggcaaaagacacccacgacctgcttacattccgccgtgcgagaggaactggtgaactagtaaaatgagctaaaaatctcctctacgcaaacggacttgtaaaagaaacaaacaaatacaatataccttgatggtatgacagttagagattaggcttgacaggaacgaccgtccaggcttttaccgtcaccttcaaccaaacgctgacagcactggtattaggtattgtggaaaggttgctctcgtcaaatgtaaagtcggctttcgagatagtataaatctttcctttttccagttctacaatattgccactgccatctttgaatcctctcacggtgataaactggtcacctgtgccgaaattcacgctgctgccggccttagcagccaaattactcaacttaaatacgagctggagttgctcgttcgcgtcagtactgttaccgttaggaacaacctgatatgcccaacgttgccctgcagttggcggaatgacttcctttgggatacctgtagcagcgacggcagactggtcaaagagttttccagcgttagcaggggtgtaaagcccctgtccttgagcataggcagcaggagtagcaccatattgtactttcgttcccacaacggtaccggccaggttgaacttttcaaagaagttattcacatagattccttccagcgtaaaaccatccaccgcactggaggccgtagtcgccagaccttcgatttcgacacgtgccacggcaggaccgatttccacttcggcatacttgtcaccgtccgttattccaggggcataaggcagggccggactaccggtagtccatgtctgcaggggtttgtcatcgccgctcaacaccacatccgcaactgcagactggcttgtgatttccagttgtacagctttcaatgcagctacggttccacctgtaggcaatgaagttccggcaggaatattaccacataccgttacagtggtagccgccgcgggtacatccgttatttgggtaccggtagtcagattcgcaatcgtgatgggagtggttgtagtcgcgttcacatatttcagaatgctggtcccgtcatggaagtatacatgcagattacttaccgtagcaaccgttcccgaggctacaggaggctcggtcgatctcgtcagcgtcggcaactccagcttcatgaatacgcttctcgcttccccgttctttacgtcaggcacttcgatgtcatcgttactgcacgcggtgaatgctgcagccatagcaaccattgtaaacacgcttaacaaactttttttcataatcattgtaattaaattgttaataaaaaaataaacactaataaaacacttgttaatatttaattcgtacttatactttttttcctgttttgttctttctactttttactatttcccttccgctatcctgtccagttccatacggagcccgaagaacttgggaatgaggtccgacagttccggatccaggggaatacgcaggacaagattgggattcatgcggcaggccgcaagcatatgttccactgctaagtaatcatcgccctgccgggcgcttaccacagcatgcaggtattccttgcgggaatctacgggtaactggtctaaaagagcggaagcctctttatgataaccgagctgtgtcaggcaaagggcggtgttatagtcaggccgtttttccaatatcggcaaggcttgccggtattgtcgctctgaaaggagccgcaaggcttcggcatactcttctccctgcggagtatatacgggaccgcttgccgcaagagagtctgtctccgcagaagctatgacatattggtccagagcggaacggtcaaccaggtcgctaagcgaggccacaatgaagagcagcgtgtccgaggcggcaggccgccatgtgctgcggtcggtggcttccacgatagactctagccgcacacggagctttttcattccatcggtgacgggcagagaatatacatagttgtagatataatcatgtccggaaactgaatccgaattctggcggaccatcacggagtcgatataggggaagggaatcatacgccggcggatttcatcacggttacggtcattcatctcattttcggcaatccggtcgtagaaataacggtggcgggagatgtccatcgaatcggtggcggtgaggacatagttgtgtatgttggacaggctgcgcccccccgttataaaggtcacggaatttcgaaggtacacgatcggcggtaagctcgcgttccagccggtacatcggccaaaaggaggccgtacgatgatatttacggtcataggaggcccacaacccgagcgtgtcacgaccagccacatagcgccgtacgctttcttcgatccgcttgcgttccaggcggtgacggagtgtcgcacggttggcctgcgtacgcgtgttccagaaattctggcgttcaagggcaaggcgtttccacttctcgtaggcaagctgacggtcgcgctccttgccgtaaagttcatagaagaacctctgccggcaggcgatatccttattgatgcctttacggtcaagatacacactatcataagccgaaggatcgacaattccattaagaaacagcctgtacgccttatagtccgcttcctgcatgcgggtaaaggaagaaccggaaagcacaacaggtggtagcgggaagcctgaactgtcagaggtgcagagcatcggggtgagtgtgacacgccagcaactgtcaatcaggagggaagggacatggatattgaattccaaacgcacggaaccttcccgcatggtgacctgcttgacgaccgtgcgtgcagcgacgatgtcaacaccgcccaggtgtatggttttccatacgtcatccgtactgtcggagacctcttcgaactcaccgggaagagtgtccgaagaagtggtgaaccccacctgttcggcaagcactccggaaggtgcgctctcctcgtggggaagaaaaatattaggacggccggactgcataaacagccgcatagtccgcggttcgcgggaagtggaacaggacacggccagtaacactcccgcgcagaaagcggcggccgttatgtgggatttgagatacttattcatcattcaactttttatatcttgtttcaacagataagatggtttcagaaaagataaaccagattaacggcggtacgtgtgggtgtcacatagacaccggagcccttgccggtacgcttaccgcagttcacgcaacggtaacgttcccagtcggcccagacaacaccgagacccagttcgaactccagattccagcgacgcgaaagggggcgcaccagccccgcagaaagcccgccgccgaaagctgtgccttcgtaacggtagcgatgtccgaacagaccacccgcattatatatggagaacacaccgtggagcccgataaaacaaccccttccgtaagtttcgcgcatccaataacgcacaccaggctggactgtgaagtttttaagcttgccgtcatcccaaagacggaaaggattgtactgtacgggaagatgggcggaccaatgcgtggaaaaagccatggaaccctccacattcagattccccgtacctaaacccaccagattggttctgacagaataaaactgcgcggaaaccttgtctgaatacacaaggcaggccaagacacaggcaaaacataaaaagtacttttttctattcaaattcataattcaaactaggataactcaaactttaagtggataaacaaaacatgcacccaaagtaaacggatgaaaagctgtgtcatcataataagactgttcttattctacgtgcaacctgtaaaaatgaagtattttaatgaacaagaaacagttttatattatcacatctgttttgtttttcctggttgcaaaagtaataacacataaatcacgagttacaaaatgaaaccacaaatctaacgtccgcattgcataaaacattataatacagaaacataaagacttcgttcttcttatttttctaacacgacgctaacagatgatttacaaccttaaaaaatatagggcaatcaataagtttctgacaattgactggaatagtaacagatattataatgaaagcatcttcatactttccggacatacctcccaggagaattaaacctgttatggcttacctccatgacaaaaccattctacaattacatcattccggtattatggcaaaaacaatctgaacatattctagatttaattaccggatgatgcattagtcattggaacctagtataaagttgaaatacctatcccagaaggcttaagaataattctttattagctgtttccgtagatttaatacgtgatttgagccgtgacttgcgagcgtatacattagccaccgtatccttcatgaataagctaattacttgcggtgaaaatcctacaaaaatatagcataataacctggtgtcggaagctttcatagttggaaaatcttccttgagcttgtacatggcattgtcatgacaagtgtttacgattttttccagttcttgcagtatgccattgttttctgcaaaatctgtaattatctgctttacttcattaaatatgactgactgttgcgatgttgtattttcacgttcatagtaggtctttccaagtttatcgacaatgtcaaagcgtgaagcagccaatcctcttaaataactttccgtagtctgctgttttttcacgcgttcagtaagagccttgtactcggaattggctttctctgtcaataacaaataatggttggtacgatcacgttgcatgcgtaaacgttggcggacgatataccaggcaattccaataataaaaaaggtagcggctgctatagctatttcccagacagtccggtttttcattctgtattgggcgaattttgttcgctctttaaaatagtcccgctcgaccataccggcggagaattgcatgtttgagcgcattattgaatcgttcaagtagatatagcgatgtacattgtccgttgctttttcaaaatttttagcctgcacttcgatatggtatgcagtgtattgtagttctgccatgtcgcaaatatcagtagtgtgcgcctttgcaagctccagataataccgtgcactgtctatatgattcttcaaaagacttacatctgtcaatgtgtgatatccatataccgtatcctgtcgggcggaaagttcgattcgctgtaacaggtcattggatatatgccgtttggatatcacatatagtgatgcaagattagtaaggctgacttctatcagattactgttattatgttcatcggccaagtcaagagccgccgaatacagccttattgctttttctatatcttttgagtgaaaagtagcggctgccatgtcaagggttgcctttgtctcctcctggatatcacccgattggcggaaattatttctggcttcgtggaaataatgatatgcccggctgtagttcatttgtttataatatacttcaccgatctgtctgtataaaagccctttgtaataagattcatcggtatctgtcagtttcttttctattttgagaaaaagacgtaatgctcccggtttatcacctgtgcgtaatttaattcttccccaataatatagagttttacactggtgacgtaaatctttggggtaatgtttataatattgccaagcctggcggatcaatgaatcgtcagtaactttcatttgttttttttccaaagcttcggaatagagcaatgcatatctggcctgttcagcccggttgccttctggtttgagtttttgtagtattgctaatgcactatccgggttgttctgcattagcttttcagcctcactaaggcgaggggtctgttccctgttataacaacctgtaaaatagagaatagctgatagtccaattataattttatatttcatattgcgaatattaggagtaacaaacacatttcgatgcggaaagcttttattagaagaaatataattattattacattctttgtatctcaacagaaaccataaatactttttttgcatgattccctgcatgatagttctcaattcctatatataccatttccaaaaacagacaataaccaaaaagttataaaatatgcaggcttgggagtttagtattcttcatcttattatcaactttaattatgcgctgctttataccataatgtattttctttcagcacagtcataggattgtcactcggatcggatgttgttataccggaaaatgtattgataggaataatacctttggccatagtgtagaaattttttgtatgggttttatatggaacaagatgatttagctgctctctaaattggtttaataatataggatcgttacagagtgaggttatataatctgcaaaatcataaaatattacaggagtataaccatctaaacgttggattgttcccctcagggatttgtcaaaagaatatttactattgatactttttatgatggctgccatattctccagttctgaacagtccgttactgctaatgtcccacaaggcattatttcataggttgaataaaaattgtaaaattcttcacatcccgattgataatcgggattccccagtaaatattccccaatagcggcataaggcattccgtatgccatcatctcactggtagaaccaatcaaatattttgtaacatcctttaattcataggcaacctctatagatgacatataacagtcatcaaatagaatatattccattttcatgcctgcattagcaataccggaggctagagattttatatctgtttggtattcggcggtcagtcctccaaaataacgtgtcaatggaacaccctgatattcccaatgcattttcatgtgaggtgcggaacgcactttcatctcataaacaggaagccatcccataccgtgacatcctataatcatggtataaacagaagccggagcaaatgcctttacatcatttaaaattgctgttatcccatcgattgtcgtaaaaggcggagacttatattttttaagtatttcacgtttacatctcccgtgagaagacacaatttcaaacatcatggcctccgtactaccggtagaaataaaaacaattactttctcattgttcagccctattttcgttatacatttttccaggtcagatatgttattataaaaatagttcgtcaaatttgaggaccatggcaaatacatgaataatgttttccggttggcttctatcttttgattttcctccttctcgcatgaagaaaaaagtaaaattcctcccaataaaaagataatgctaacctttacgtagatttttttcgttgttttcatcctgcaaattgtccaataactcattattacttttttattatagccttccattgtaaaatctctattttatcttaaatgtgaattgtaaataaccatttcctgatattcatagaatcaaatcctcttataatcttacaatattatgactcattatctcacaatatattgaatattctaataaacagcatgaatttaatcgtttataacacgagatgattttcttttcaatgccctatggcagttctcattggagacactgccgaatggcacttgtttccgtttcattcttgcaaaaaaagatgaaacggtttaacaggaacaactgcctgttgaaacaataccggcaccaatgtcacaacaggcagttttatggttacttatggcagtccaaaccgattttcaaagccaaatcgctccggcttccacatcccctgacttataagtgtaaattataaactcttcaagcgcttctttccatgtaagattgaaggttcccataattgaatgtatggcacgattacttttttcatcaagcccgtcttcttccaccccttcggggttcgtgtcttcgtctacccccacagtctcttcacggctccagaacaccactaccggaatgtttaggttgatatcccatgtaccacgctggatcaatattccggaaggtttatagaacggatcaaaagtacctgtttccggattgcccttggatttgtagccgtgataaagacgaattttcaggtcgaattccttacggtctttcaaaaaacggataactcctttcaaacctatcgggttactgtctcctgttatttcagcttccttgctatgtttggtcttgtcccagggggtagtgtccacataaagataatccaccaatttctgcggttcattgtcatcggcttccggctgaccgtcaaatgtgggttttacattttcaggcgtgaagaaatgttgatgaatattatcctgcccgttttctataaactggctgttcatcaaatctcctttggcgttatagtaatagatgaacatcaaataaacgggagccggggtgtatttcccataagtatagtagtctccatttttctgcacgtagaacttgctttgactgccttcggcaagcctccaacccttgccggctttcagctcataagttatttcctgaatacgtttcatgtgcttggccggagattccggattctggtgaggtccaccgactttctgtatttcattccagtctgcatgcaggtgacattccacaagacggatagtcattttggaaggatcttcatgcaatttattatctgtctcattttcaggaattacaggatctttactgcatgaattgaacaacaacgaaagagctgttcctatcaggaacatcaatgcgattttacatacatttgttttcattttttatttatttggttaataataattgttataaatcaaaaactccagttcactacacaacgtacatcagatcccatgtcatgtgcatagtagcgtgaacggttagtgtattctttatattctttgttcaagatattgtctgccgctatcatgaattgtagtttgtatccgtattttacaggacactcaaagctagcagcgaaccccaagaggtggtatgccggaggggtatagggaataagatccgtattcgagtcaaaccgggtctgttttgccacgaatcgatgtctgatactcaaacgtaatttggaatgcgatttggtttcgtgaagccatgagaggtcatggctgaaacgggaagaggggatataaggaaggtaatttcctgtcgtctgttcatttgcccgtataaaagaagcaatcaggtgataatcccatgaatttatgggcatgaagtgaaagtcaaaatccattccgcgaaagaaagccggggtctgtttgtattggaatacagggtatacccccgaaataacagtgatggtttctttcttcggttcatcatagatatagccgcttatccattgcaggtaaccgtccattcgggcactgaataccttattgctgtaactgatggaagatatccatttatagctcctttcggagtgcatggtagaatctcctttgacaaacattccggatccgagttcatttccgttgctatataattcatacacgtgaggagctctccaggccagcccgaaattagtggtgagcttccattggtcagagaaatgatgatgacctcccagactgtatgatacgttattgaactttcttgttcctccatagagacttcctgtccagtcataaccactggcacgggtttcctgtccgtcaaaacgaatacctgcttcaattcctcctttactgtaattatacttcccgataccatatattcccatctgtgtctccgtatagttgggaataacgggaacaatacctgttcctgcctgactgtgattatcaatgaacataatttgtcccccaacctctgtttgccatgaattataattcaatttccagcagagagagttttgtaatgagtttaagtgcagggaaacagctggaatgtcggaacccagacgccggatgcggttttcctgtcggtcgtccttctgccaggaactttgccagtaaagatttcctgcgttccgcatactgaacttcattttaccaatggctgtctgatgggtaactttttgatatgggtatgcgatacttcgcgtgaaaggatctgtgtacaggggacgtcccaatcggatacgttctgccagcagatcttcacttcccatctgggcactgaacattactcccgtccggttgtaaaagtgactgtagaatccttctattcttaaacgtccacggtcatagccgagtaaagcggaggtatgatgttctctggctccagtgttatttagaagatagtttgcggtggaacggtctccggaatttgaatatgtcccctgtactcgccaggcaaggtcacggagaaaagggaaagtgccttccaactgtccggtcagcacataacggtgaccattacttccataaagtatggaagtctttcctttcaaggccttcttccggaagggtaagggagcctgttccatgacaataattcctcccaaagcttctgaaccatatcgtaccgcgtcagaaccttttatcacccgaatggaagcgtttccgttcatatccacttcaggagcatgatcaactccccattgttggcctgtctggcgggaaccattgtttatgattaatatccggttgccatacattccttggatgacaggtttggcaactgtcgtccccgtactgatggaacttacgccactgacctgttcaagcagagaggtgagagaagttcccaatgcgcgattgattgcgaaggaagtaaggttgttgcttaccgtattccgagtcactccggagcactcaccggtaataatgacttcttccagaatttttatctccggataaagatatactgtttgaatattcacctttttgaatgcctcactcaaatatatatattgagatttgtagcccaaactctgtacaagaactgtatccttggaatttgtcttccaagggataatgattcttcctccggttgaactggcaaggggttgattctccaataagatgtaagctccttcaatcggacgtccggtttccttatctacaaccaacagtgtcctatgtgtatctgattgctgtcggtatttctgtgcatacatccttgtaggagatattgcacacagccagacaatgaatagacacacatattggaaatatgcatgaaatgtcatactttacgaaaattgtaatgaagttataaattgtttaagataaccaaagggcacagcatccctctttcacatgtcatcttataatgcatgcaacccatgagagggattgtaatagttggacaggaggagcgcggagagacaataggggaaaagtaacagtaatgtccttctccttttggataagatattcaacggggttctctgtctgaacgcaattgtactcaaagctctcggcttcggtaaatgaagataaagtgaacaggcagatagcacatttatcggcagaatcatgatgggaagattgttgctcatcatgagatatacataaatcttctttgtgaacatgaaaggctttcacaaagaagaaaggcatcatagtcagcaacaataagcatgccactatggctctgtatttccgcttttttcttgcattatccattaggttgtaaagatagcagattgcataattgtacgcaatacctataaatgatgattttacgatcaagtacgattaaatatattgtcccgattattttgatatgggaatcaaataaatcgacacatcgttaccggctgtatgataacaggctataataaatcttcctatttttattcctgttcatattggagggcctgtgtaagatgccccctaaaaccaaaatgattcttctcccagaaaatattcagtaatgatctcttgataagttttgaccgatgagcattattattttaaaatcaagtacttcgattctcatataattgtttttaaattcgtttaaaattgaacggtgtccaattgttacgataatacttcagttcacgttgatatttcgaggacgcaaagtacggctcattcccaaagcataagagaaaggattgatgtcgaaatcgcgttcaaatgttccggttaccatattctttctttgcggaagtgtacctggaaagttttggttacgccaatttccttgtacagatatgccagcttttatcttgtcttcattccaatagaaagatttttttatatttattggtcgagagaggctactactaccctcctgaagttagtaaacggaatcattttttacttcctctttttttcttattgttgtgcattaataaataaagctcttgcaagaaaaaaaaggaatatttttgtcttagatatcattgtgaatttcaatttaaatataaacacaatattggaccggatcaatttgtcacaaatcattttataacgaagaaggtatgtgtatggacatattaaaaagaatagcgtcactcgtcaataccaaatcattagcaccaatcatttgaaaaacaatatacaaaaaacgctttccgccaatctcctttaattgggcggagttaagttcaaatcttacattatccaaatatatatcctttacagaagaaaagagaccattcaagacgttcttgctccatttattcttttcccattgcaatgaatcatgatccttaattacaaattccacatactgtatccatctatctatagaattggaaaacttatttttcacatcaccataattactattcttaagtttatttttcacaaactcatgcaaatccggtgttgagtaggctatcaactcattcttcaattcacttaagggtttaaaaccggtgaatattttatcaaattctgcaagcaacaagccaccattaccctttgcatacatgcttaaatgtagtgtaagcatgttgcctgtgtcgcttttttctttcagagttgtactgatttccacagcatacgcactttcatcatatgaaaaaatgtgaccattaaatagagatggattttcatatatccctctcatatacttctgttttataaaatctgtatttacagtaacctttccttcataatatttattcttgtcaaacagaagtgatattctttttttagacctactattattgtacctaagatagaaagaaagctgattttgctcatattttatatcttcaagaaccgtcttctcaagatcttccagagtaaaaagatatttttctccccctacatttatagaataaaagtccactaaccggcctaaattctcaattgtaaacatgttcactttatgtaatctgtaaaagctatcaaaatcaagctttgcataataatcagcatttgctttccactcagcttgtgcaccattaaccatttgataatcgtcaggtttgctcacaaagccggtaaaagtgaattcattcttaaaaggtgaaccatttaccgtgcctgtaacatatagcacaaatgagcctttttgataatctttccttttcactacagcctcagttatttttatcattttcccgtttatctgcagcgtctctttctgtgcttcaacaagtcctaacgcaacatttatatctctagacatatcaaatctaaaataagctgcaacatcctctttagccacagcgggaactgatccggattgttcactatgagattcttcctgttgcctgggatgtcgattccgggattcaatcggatcattctcaccacaagcaactaataacattatacagacaagaaataataggcacctttttatgttaaaatttcctaccttaaacaaatcacatgtcctatcacacataaacattactgtcttttcaatatatattgtgctgcgagccgcccgctattgttgaagatttccgtactgtcagacaagaccactgcgtcgtcgagaactttataatatgttttggcacccgatgaaggagtaaccagttcaatgatgttttcgcctatcatattatatacaccgctctcttcaaaaataccattctcctcacccagatactcactccgcaaatcataagttgcatcactattaattttcaatgtcgttttgatgccaccacagtcggcacaaggtaatatgccttcataggtgccataacaatctttgtttttgctatccactactccggcagcactattttcttgttgtttatatttcttcccagatccaacacagcctgatgttactattatcatggctgctaccaataaatgcaatttaatcaatttcataatttaaaatatttaacatataatttgaggttaattataactcgcaagatcattatatacaaagacttattgtaaatgcatagcagtatataacgaaattatcttcgtctcactcgctatgcattacaataaaattagaaaaaaaagaaaactatttaaccgtcacattgatagttcccgttttcttatccttatctgtaactgtaatagtagtttttcctgccttaactcctcttatgttgactttattttccttgactgataccgtagcaatattgacatctttcgcaacggcagaatatggctgtgcaccaccttttactgttactataccatcttttccaacactcacagtaatagattgtttatcaaaatccagtccttttggagtttttggggtctcttttacagttcttacagttacagcaacttttcctgtaactcccttccggtccgtaatagttatcattgctgaaccatcttttacaccggtaattacaatcgcatttttatctgatttcgcaactgcgatttttgcatcacttgatttcgtcgtatatggtgcagtaccattactaacagacacagtaaccgttttaccaactgcaacttctactttattaggactgatttttaaattgggcttatcatcatccttatcacatgataccaatacaaaagaagttaagcaacaaatcactaatgccatcgattttaaaaaaggtttagttttcatttttgataaatttaaattaatagataaaatgctaatgagtactcataaataaaaaagtcagatttttcttactttttctttgccagcaaaaataataaagcgaaattgtatttgaattataaaatgattttaaaaatctaacacctcaattcatatacatctaacaatcaacaccttagtgttatgaaacattattttatctcacattgaactaacatctgttcgaaaagcataaaaaaacaatattattccaatatcaaacttaaaaaaatatgtttcacattgctaattctgattatatggtcaatcttcataatagagtgatacactattataacaccgactgttacagtatccctaacagtgtttgaaaaagaccctttttatgatatttcacaaataccatatattccctataatattattcttaattagtgaatgagccattcaaagtaaaaattgaatgtatttttagcatattctataaaaatcaagaaaggatggccaattcaaaaagtattttatccaacaaacggaacattctttttacaagttgaaggtggtatcactcaactataattgtggatgatcaaaaacgtgtgttcaaaccatacacaataaatcttctatagcacaagatttcttgaacagcaagagataggtactcgcaagtccacgacaaaacgttttccgaggggatactgacgaacttaaggatattgaaatgaggtaccatacaaaagtcggttgttgtcaccaatattatcttaaaataactcatctacaaaagctatgtgttgtgacatcgtattgttaaaaaaacattgtcataaacgtctgacgtctcttgatagatttacttttagagggtatcatatagctatcttccatatcgtttcgagtcgctttctgtactcatttgatatcattcaggccatactcttgaacattcactcatgcaataggggcacttaagttctaataaatagattatctcgctagcagtctcatctctcaccacacagctagatttattataaagttaaattcaatgctcgtgcaaacggctgtttgttctgatttaatgtactctttgtttgaaggcacaaagatataatgagtatctaatattcaaataaactttgttttaagactttttatgacacaaacaaatacgaatgatttgaaaaataaattgattctctttcataagatgttctttcctataagttaataaaaaaaacactttatataattttttttctcttcattttttcgaaaagccccagtcttccattttttatagaatatcatttacatattcctattttttccatccatgcattatatacctcatttttaggtgaagttcacccactctctcctcttattttagtcagattatgctgccgttctttttttttcttcgtgaccttttcaatcatacataccgcattgaacgtatgtactccaaagaaaatccaaaatatttccacttccctgtttctggctttttattctggtctgtaaataatattatttctacattttaaaacttcctttcaatctggtagcactttcatggctgagttctgaccatcaaatcttacgaaatggagcaatttagatagctcagaccttgtacttaaagaagtgttttgtaaaactttttaaattgatattattagtgtagcttgaatccgcagcaagtaccttaatcctaactttgatcagttgttgtaaatgaatacagtctttcaaatgtattacttcgttaaaagccgtaaaggagatatgttctataaaggagatttcatctatctgtatactgttgactttgcctccgaattaaacggatttgttttttcttgccttaataatagtctggagggactaaatattaaggaaatttgctaattactgacgaatcacattaacgatttaggattggttagtgaatgaagaggggcaatctgaacaccactaaataactggtaacgaatattactagttaaatatttaatcagttatgaatatgaaaagttgatataggacttcaagactaccaaggccattttattttcaggagaaaaaaataacttttacccccccaaaaaaaggagaggatgtcaagcatctgttgggttattcccaagaaagtgaacagagtatggaagctgctgatttattcgttacaactttgacgataatttttaagcatatcgagcggtgtaaaatctacctaaacaaaacacgatttcttttatatctttatcgtgtatttttattttagattttcatcggttggatttaaccgattgaagaataaacttttagcagagtatttgagaaatagaggtaacgaattagcaaccgtgcaaatttcagcgatttgcggtgctatgttgtcaaataactctttgtaaatacaaataaaatatttagtacaattttgaagacatcattaataaccttatttatatccatacacctttggtttgtttccctatatttattgataatcttttattcacatatttggtaaatatttcaatctacgtagattttataactaatagagtataaacaatacaagctattccaacaaataaagctacggcagagcatttggtaaatattgtatctttatttttaataccatacataagcccaataatagcacataaaggaataccgacaggaataatcgtcagaaaccaaatgagtattttatgatacccattgctgttaatactttgtttttcaaattactcatagctaccattctcattgcttgttactcttcgcatctctttctttattcatcaaccgccaaatagctttctgatatttcaacttggcgaacatctcgtcatcttggttatctatctttaaggtcattacccgaatacttggggcagtgggatatcggcttctcactatatcatccactagaaacccgcatagtccggtagccggttctgtaaacaagaaaccttgaaacatgagattaatatagtctgcattttcgcaaagatacgccttgtacctcttatatgtatccaacttcatataatcttctgcacggctgctgaaatttggcttggcaatttcttcgcataaggcagattctaatttgctgtaggtggcagtatctaaatctccccaccaataatgatcttcgggattgaccgacatatccacccattcagaagcctcccagtagtctatcgcaaacacaattgaatcggctttctctttggatgagtaatagatggaatctttctcccaacctttgaatatactttcaatagaatctattttctctttcctaattttattatatatgttttttaaatcgtagccatgaggtaacgatatttgaaaaacaccgttttcaattcttgcattcacctttggatttgtgattaccgtatcgtcaagtacaaaagctatatgtttgccaattgccttttctgtttcttttgcccatttttttagtttatgcttgcttatttgccccacaattacgcatgtcccattttcatcagaatccattcgtaacgaaacaaaatcttttactgttacaatagactctttagcaatactgtctttttgctgtgataggatgtgataccatccattctcatagtgggttttatgtatttgattacaggaagcgaaataagcaattaaaataagtattccgaataaattctttttttgcatgttcttatataataaaaaaataaactgttatctgttcctgaattgtatccgtcagatatatttaaagcattatgtttcaaattagctacttctccaaatatataagcaaaagtagattgtttgcctttttaagaagactgttcaaatctgttttgatattgtttttcttgatcacaacttataagatggattgtgtatagttatttcatctcgccaagcatattccttgttttatccatataattactgaaatgcgcctttacctgtcaaaaatatattaccgtaaataatgtaccgttttatcccaaaagatttaaaaacagttctttatttactatttttgcagatttgatacgtgatttgagccgtgattttcgagcatatacgttagccaccgtatccttcatgaataagctaattacttgtggtgagaatcctacaaaaatatagcataacagcctggtgtcagaagttttcatggtcggaaaatcttccttgagcttgtacatggcattgtcatgacaagtgtttacgattttttccaattcttgcagtatttcattgctttctgcaaaatctgtaattatctgctttacttcattaaatatgactgactgttgcgatgttgtattttcacgttcatagtaggtctttccaagtttatcgacaatgtcaaagcgtgaagcagccaatcctcttaaataactttccgtagtctgctgttctttcacgcgttcagtaagagccttgtactcggaattggctttctctgtcaataacaaataatggttggtacgatcacgttgcatgcgtaaacgttggcggacgatataccaggcaattccaataataaaaaaggtagcggctgctatagctatttcccagacagtccggtttttcattctgtattgggcgaattttgttcgctctttaaaatagtcccgctcgaccataccggcggagaattgcatgtttgagcgcattattgaatcgttcaagtagatatagcgatgtacattgtccgttgctttttcaaaatttttagcctgcgcttcgatatggtatgcagtgtattgtagttctgccatgtcgcaaatatcagtagtgtgcgcctttgcaagctccagataataccgtgcactgtctatatgattcttcaaaagacttacatctgtcaatgtgtgatatccatataccgtatcctgtcgggcggaaagttcgattcgctgtaacaggtcattggatatatgccgtttggatatcacatatagtgatgcaagattagtaaggctgacttctatcagattactgttattatgttcatcggccaagtcaagagccgccgaatacagccttattgctttttctatatcttttgagtgaaaagtagcggctgccatgtcaagggttgcctttgtctcctcctggatatcacccgattggcggaaattatttctggcttcgtggaaataatgatatgcccggctgtagttcatttgtttataatatacttcaccgatctgtctgtataaaagccctttgtaataagattcatcggtatctgtcagtttctcttctattttgagaaaaagacgtaatgctcccggtttatcacctgtgcgtaatttaattcttccccaataatatagagttttacactggtgacgtaaatctttggggtaatgtttataatattgccaagcctggcggatcaatgaatcgtcagtaactttcatttgttttttttccaaagcttcggaatagagcaatgcatatctggcctgttcagcccggttgccttctggtttgagtttttgtagtattgctaatgcactatccgggttgttctgcattagcttttcagcctcactaaggcgaggggtctgttccctgttataacaacctgtaaaatagagaatagctgatagtccaattataatcttacatttcatattgcgaatataataatgtgttttattttttgcatgggcgattaggaatattttaccaatataaattattctttaacttatatgattatcgctcgctatttatatatattttttattgggcctaacaatatataattgcttattagcatattatataatatgtataatcgtaatagtacaaaatagcagtaagttattgctattcagagtaaaagtatcagttcactcgttgttgttaaaaaataaacttgactaccctaaaggtgtaagtgtaagtgcttttttgaattttatcaagggtgttagatatgtgttagattattaattgaaccatttttgcaaactactgattataagtaaaataaaaatcaatgtattagatttattcttttgtcctacaactaaaaagctctgcaatctttttacttttgcattcgaaaaaaataaaacaatagattatgaagaaaattgctattttattagtttttactttgggaacatttattgtaaatgcccaatcagttgtagaaggaacaaagtttatggacaattggtctgtaggagtgaatgcaggagcagttacccctctcactcacgcctctttctttaaagggatgcgtcccggtttcggagttggaatatccaaacaattaactcctagttttcggtttggaatttcagggaatgggatatatcaatacaactccgagtaaaacagcttttgatgttttagatgtcagctcgttaagtaaaattaacttaataaatctatttgcaagctatcggggcaaacctcgtttgtttgagatagaagctattgccggaatggggtggttgcattattatgtaaatggtaaaggagatgacaattcatggtctacccgtctcggattgaatcttaatttcaacctcggtgaaacaaaagcatggacattgggaattaagcccgctatcgtatatgatatgcaaggtgattttaatcaggcaaagagtcgtttcaatgcaaacaatgcaacatttgaactgactgccggattgacttatcacttcaagatgagtactgggaatcattactttactaaagtaaaagtctacaatcagagcgaaattgatgatttgaatgttgctattaatgcacttcgcgaacaggtgggcagtcgtgacagagaactaaacaatgctaaccaaagaattagcggtttgcataaagagttggaagaatgtcgtacaaaggtcgttcccattgaaacagtagtcaagactgcccgcgttccggaatctatcattactttcagacaaggtcgctcatcagtggatgcatcacagctaccgaatgtggaacgtgtagcctcctacatgaagaaatatcccgattcaaaagtcattattaaagggtacgcttctccagaaggcaatgttgagatcaacgcaaaaattgctaccgcacgtgcagaagctgtaaaaacaatccttgttaataaatacaagattaatacgtctcgtattactgccgaagatcagggagtaggtgacatgtttaccgaaccggattggaaccgtgtaagtgtatgtactatcgaagattgatgtaataagaatatttggagttgttgaaggtaaataaaaaaggaagcccgaaatctgagggcactgaaaaagttctttttctccgttagctcctcttcttatgaattggctccaaagttgcatggcgtatgataaatttcatttgcatgcaacttttccttatattggtagtgagtaatcgtctattggtatacatgcacgctggcaacgacactctcaaaggagactttgaaagaatgcaacttcagtccgcttttcccatctgctccgactacggctcggaggctatcgtccttctgatctttgaccaaaagaacttcttggtctttgatttttttgctcatattactatgtatttaatgacgtcagtagcggtttacagacaaaagtaaacaaaaaaaagtgagtgctagagattgtaaataagtgagtatttgtagctttgatatgattaggagtagcatattgaaagttataaatttcatttgctgaattaccataaatggggaatggtaagtaaaaaaatcatcattttaaggtattgcaaccgaaaaaatatgtgactaattttgcgttataaaataaagaattatgttctgacctatgcaaacaacgaaggattatatacgtaagctattgctggaaacagcgcagaaagcttttttcgaaaagggcttcaagtcggtgtctatgcgtgagatttctaagttgtcgggcattggtctgagcaatatatacaattactatccctgtaaggacgatttactggttgatgtgttgcgtcctcttttggctgctatgtacaggatgctggaagatcacaaccgaccggagaatttctcccttgacatatttatctcagatgaatatcatcgtgcatctttgcaggagcttatgggcattataactcgttaccgaagtgaattaaatttgctgtttttctctacgcagcattctcgcctcaaagattatttggaagagtggattgagaagagtgccacaatagggatggaatatatggaaaagatgagaagactccatccggaactacataccgatatttctccgttcttcatgcacttcacctgctcttggtggattaatatgatgaaagaggtggtgcaacataaggaactttcctgcgaagagatagagtgtttcatcagtgagtatattcgctttagcacgggaggatggaagaaactcatgaatgtaaagaatgaaagatgaaggcagaactattgaaacatcctgtctgtcaagagataactaatcaaaacatccgtttctcgtcttgtctgcaatgcaagccttgcggaaatgattgtacgattgtaaacaatcgaatctcttttgtatttgattccgagacaataggcatcagctaccttctgctcgactccacacctatagcctgcatggacagatgctgcaatcttgtcaggcagcgtttcgtttgatgcaggagttggaacgccgagtcattccagaagaatcactaaataataatcagcatatgagtatcatcaacatcatcagcaacgacgaattaacactcgtacaaggagtcaacgggcttttcttctgcgaggagtcatgggttacgcaaagcagggcagtctcccgtatcggaaaggttttgcccaaagaaattattgggacgaaagatcaaagtaccaacatcgtacatccgcagactgaccgaactaaacttagttgccaaaagcatgaaacgtcttatttctaaatctaactgtttctcctaccgagcgagccgcctgcaaagagcggctcgctttgcttctgaacaaaacaaacttttgttctcttttgacgcactaacttccaatccatcatagccatgtctcaaccagtacttatagcatttttcctaacatcgtttgccggtatatccacagggataggcagtgcgattgcattttttgctaagcgcaccaatacttcattcctttctctttcattgggattttcaacagcagtaatgatttatatgtctttcgccaatctgtttgcctcttctttgcagactcttgccaatatacatggcaaggacgacggaactcttcattccacactttcttttttcgggggaatcgtattgattctacttattgataagctaattcctcactacgaaaatccacacgaaatgcatcgggtggaagaaatgagcttaaaggaagaacgaaagactgaaataaagcctcaattattacgcgtcgatgtagtgacagccttggtgctggcaatacacaatttcccggaaggtatggttacgtttcttgcagcattgaaggatataaacattgctatacctattgcctgtgccatcgccatacataatatacccgaaggcatttccgtctccgttccgatctattatgctacaggtaatcgtaaacgggccttttggctttcatttctatcgggattggccgagccggtaggagccgtcatcggctatcttatcttggcaccattcctcaatgaccatgttttcggcgttattttcgggatgattgccggtatcatggtatttatctcgcttgatgagttactacccgctgccgaagaatacggtaagcaccatcatactatctatggtttggtagcaggcatggcggttatggcactcaacctgctgatgttgtgttagcaagactaagtaatataaaaaacataagtaaaaaaaagaaagaatatgaacacttctcactcctgccgttgtcacgtgcatgatgcccacaaagagcattcttgtgtccacgcacattgtcaccattatcatatgtagccccaaagtggaaagctatttctcgtcacgctgctgaatgtgttgaaatgaatgaacttaccaataacaaacgatatgaaaatagaaagaatcaatgactggtttgcccgtcagggcagatggatggtacaaaaacgatggcttgtactaagcttgtttatcctcgtcttcgccataggatttacagggttaagatatttcaaggtgagtgcttcgtgggaaaactacttcctcgaagacgacccgatgcttgtcaagaccaaagaattcaaggatatattcggcaatgacaattttgccgccgtactgacccaatgcgacaattcgtttatgaaagagaacttagagctcatccgcgaactcacgaacgaaatgatggatagcatttcatacgccgacaaaatcacttcgctcactgacatcgaatttatggtagggaatgaagaaggaatgactatcgagcagatagtgcctgaccttattcccactgatgcggcaagtctggaaacgatacgtcgcaaagcctatatgaagccacatattgccgagcggcttgtctccaaagatggtacgctctcgtggattattctcaagttgcgtacctttcctaaagattcagtgtggaataaaggtaagaatgccgtttctcctgaagtgctaacggggaatgagctggagcatatcatcactaaagacaaataccaaaagctccatcccaaaggcacaggcttgccctacgttaccgccatgaagatgaaatggattggcaaagagatgccccgtgtgatgggcattgccgcactcgtttccattcttattttgttactcataacacgctccctacggggcgttgtcgttccacttatcacggcggcaggctcaattgtgattgtgtatggactgttgggatatgtcggcatgacgatagacagcggtatgatgatgatacctatgctgttggcgtttgccgtctcgatagcctataacatacatatcttttcctatttcaaacggcaattccttctacacggagaacgtcgacgagccgtagaagagaccgtgggtgaaatgggctggcctgtgttgttcagtgcactcaccacctttgccgccctgctgtcgtttctcgctattccgatgcagcccatgcggttcattggtatcgctacctcctcgtgcgtgatgctggctttcttcattgccattacactgatgcccgtgctgttgagttttggcaagaacggcaaacctcatcccaaagtgcaggaaaccggcggacggtggctcgaccatcaactggggcgtttgggagaaagcgtactccggcatggcacattgatcctatggattgcagggctgcttaccgcagcactcatttatcaattcaccaagatagagaccgcctttgacatagaacgcaccatgggacgtaaaatagcctatgtaaacaatctgctggaagtaggtgaaagcgaactgggatccatctacacctacgacgtcatgatagacctgcccgaagacggcttgacaaaatcgccggcaatgcttgtacgcttagactctctggcacaaaaggccgaaggctataagctaaccaagcgaacgactacagtgctgaatatcctaaaagacctgaatcaaaccctgcacgaaggagatgcggcttattatcgtattccgacgaatccggaagaggtggcacaactgctgctcctttacgagaatgcaggcggtagcgaagcggaatattggatcgattacgactatcgacgtttgcgcctgatggtggagatcagcagttttgactccggcgaggtagaacgagagttgaacgatattgcagccaatgccgccaggctcttccccgaagcttctgtcactacagtgggtagtattccgcaatttaccgtgatgatgcagtacgtggctcgcgggcagatggtttcatttgccatctctctccttattatcggcatcctaatgatgttggtctttggcagtgtacgcatcgggcttatcggtttgatacccaatatcactccggctttggtggtcggcggactgatgggatggctgggctacccgttggatatgatgaccgcaaccattatgccgatgatcctcggtttggctgtcgacgacaccattcacttcatcaaccacgggcatttggagttcgaccgtcgaggtaattatcgggatgccattctccgctcgttccgtacgatcgggacaccaatcattctgaccagtgtcgtgatatgtgcgaacttcgctatttacatgacttccgaaggcctctcttttatacacatgggtctgctctccgtagcgggtatcgtatcggcactcgtggccgacctctgcgttacacccgtgttattccaaaagttccggttattcgggaaagagatagaaaccaatgaaacaatcaattaatatgaatacattaaagaaacttcaattttacatgggcaaacgcaaggtgcttatgcccatagccctgacactgtcgggattaagcggtctgctctcgcttatgccgttcatcttcatttggcttatcgtacgctcgctactattgactggcagcgttgcctcaggaatccctatcaacgtctatgcatggtgggcggtaggcacagccgttgccggccttgtcatttactttgccgggctgatgcttttgcacttagcggcgttccgggtagaaaccaatatgcgacgtacggctatgagaaaaatcatgcagatgccgcttggcttcttcgaccggaataccagcggacagatgcgtaagattattgatgaaaatgcttctgaaacccacacgtttgtcgcacatctcttgcccgacctggcggggagttttatagccccgctgtcggttataatattgatcttcgtcttcaactggcaacttggtctggcgtgcctgatccccctcacggcggctgtcttcatcatgacacggatgaatacaactgctcagaaggcgttccaaaatgaatacctcggagcacaagagcatatgagcagcgaagcggtggaatacgtacgtggtatttcggtggtgaaagtgttccagcaaacgatattctctttcaaacgtttttacgacagcatcatcgcctaccgggatttagttaccaaatacacgctgggttggcaaaagccgatgtcactctacacggtggccatcaatagctttgctttcctacttgtccccgtagtcatattgcttatcggcaacaaaagcgaaaacattgcccccatcatcaccgatatgttcctgtatgtgctgattactccggtgatagcaaccaatgtgatgaaagtgatgtatctgcaacaagatatgtttctggcagatcaagccataagccgggtggaaaacctgacgagtagcgaaccactcccaatagccgaaaatccggagaaaatcaccgcttgcgatgtgacattcgagaacgtttcgtttgcctatcccaatgccggtcaaaatgccgtagacggtatcagcttccacctccccgaagggaagacttttgcccttgtggggcaatcgggaggagggaagaccaccattgcccaactcattccccgcttttgggacgtatcagcaggtagtgtgacgattggcggaataaatgtgaaaaacattgccaaagacaacctgatgaaccacatcgctttcgtcttccagaatacaaaactcttcaagacctctttgctggagaacatcaaatacggtaatccggcagcgagtgatgaagccgtgcaacgtgccatagacctttcccaaagtcgggagatcatcgaccggctacccaacggattgaacacgaagataggagtagatggaacattcctttcgggaggggaacagcaacgcattgtcttggcccgggccatcttgaaagatgcgccgattgttgtcctggacgaagcaacagcttttgccgaccccgaaaacgaacacctgatacaaaaagccctgcacgagctgagaaaaggaaagacagtgttgatgatcgcccatcatctgactagcgtacaggatgccgacaagatactggtgatagcacaaggcaagattgccgaagaaggcacacacagcgagttgatagcccgaaacggcatctataacagcatgtggaatgaatatcaacgaaccgtgacatggacggtataaacctcaggagacaacattatgaatattagtaaatattttcaacacagattcaccttatcggaagacggggcaaagacctttataaaaggggttatagcttctctttttctcaacctggcactgatgctgccggtaatcttcatctttctgttcatcaccgattacctgcaccctgttatccaagccgggaacagcacgacgcacgggctctggtactacgtgctgacggctctctgttttatgacggtactctttgtgattgcgatgatacagtacaagagcacctacacgaaaatctataccgagagtgccaaccgtcgtattggcattgccgagaagctgcgtaaattgcctttggctttcttcggagaaaagaatctttcggatctcaccgctacgatgatggaggattgtaacatgttggaaaccctcttctctcacacagttccacaactcttcgcctctgtcatcagcattatcttgattgccaccgggatgttcttctacaactggcaactggcccttgctctctttggggtcgtaccggtagcgacaacggtcatcttcttaggaaaaaggcttatggataaagctaataaggagtactatcacgtaaggcgtgatacgaccgagcagatacaggaagggcttgaagcggcgcaggagattaaatcgtacaacggagaggcagcctattgcgaccgtttagacaaacagctcgagatatatgaagccactctgcagcgaggcgaatttctcggagcggggcttgtgggcagtgcacagtctatcctgaaacttggtttggcaagcgttatcattgcgggagcttatttacttggtttgggcagcatcgacatgttcacttacttggtcttcctgctcgttgtagccagcatctacaaccccatcatggacgtgttcaaccatatggcgacactgatactactcgatgtgcgtatcgaccgcatacgtgagatgaacgacatgcccgcacagcaaggcgatgaggattgcacggtagagggttacgacatctgttttgacaaggtcgattttgcttacgagacaagcaagcaggtgctgcgcaacgtctctttcactgccaagcaaggcaaagtaacggcacttgtgggaccttcggggggaggcaaaagcacttcggcaaaattagctgcccgcttttgggatattcatggcggaaagatcacacttggcggacgggacatctcaaaaatagatcccgaaatgctcttgaaaaactatgccgtagtctttcaggacgtgttgcttttcaacgcttccgtcatggacaacatcaaaatcgggaagaaagacgctaccgaggaagaggtgaaagcggtagcacgtcttgcccgttgcgatgagttcatcgcccggctgcccaacggttacgacaccttgataggcgaaaacggagaatcgctatcgggaggcgaacgccaacgcatatccattgcccgtgcgcttctcaaagatgctcctgtcatcctcttggacgaagcaacggcaagtctggacgtagagaacgaaacgttgatacaggccggtatatcggagttgatcaagaacaagaccgtcgtcatcatcgcacaccgtatgcgcaccgttgccaacgctcatcatatcgtggtgctgaaagacggaaccgtcgcagaacaaggagcacccgacgaactgcttgcccgaaacggcgaatttgcccgcatggtagcacggcagaaggagaccggaatataaatcgaatcaatcagaatcaattataaagaaaaaggacaaatgaagagatcaatcgcagtagtagccatgcttgtggtggggttcgctgccacaacatgcgcacaaacgggcagagagattgcccaaaaggtaaaagaccgtcccgacggcgatacccgtcggtctgaaatggttatgacgttaatcaacaaacgcggagcggtgcgcgaacgcaagctcatttcctactccatcgatgtgggcaaagaaaagaaagaccgcaagagcatcatgttcttccaatatcccggcgatgtaaaggggacgggcttcttgacgtgggattatgatgagctaaacaaggacgatgacaaatggctctatctgcccgccataaagaaaacgcgccgtatcagcggttcgtctgccaagcaagactactttatgggtagcgactttacctacgacgacatgggcagccgcaacgtggacgaggatacgcacacgctcctgggcgaagaaaccgtcgacggacagaagtgctggaaactggaatccttgcctaaggacaagcgtgatatttactccaggaaaacggccctgatacgtcaggactgtctgatacctgtcagggtggaatattacgacaagatgggcaagctgcaccgtcgtctcgagatgtcggatattgccaaggtagagggcttctgggtagcccggaagatgcacatgaccaacgtgcaaaccgagcatcagacggttctcgaaatcaagaatccgacgtacaacattcccatggaggagagcaagtttaacgtgaccacgttagagaaaggcaggttctgatgaaagcgttcaatcgtctttccgcggggctttgcctctcggtctttctgttttgccccgtgcatggagtttggggacaaggagcgggcgaatcgtcgtggcagctcaaaggccttgtcgacacctaccacgccttccgctccgaaaagccgaacgattggatgtcttcccgtacccgactcaggggcgaggtcggcaaaaacttcgcaggctcttcgctcttcgtctcgttcaacgctacctacaacgccttgctgaaagagcgcaccggctttgaactgcgggaagcataccttgaccatcggcaggagcactggggctttcgtctcgggcgacaacttgtcatctggggtgcggccgacggcgtacgtatcaccgacctcgtctcacccatggatatgaccgagttcttggcgcaagactacgacgacatccgcatgcccgtcaatgccctgcggttcttcgtcttcaacgacaagataaagctcgaactgcttgccgttcccactttcgaaggatacaagctgcccaccgatgccgccaatccgtggagcgtgttgcctaaagaaacaccccggtcccttgtctgggacgcggagggaagccgccccgagctacgcctctccaacgtagaatacgggggcaggctctctttcgccctgccgggggtagacttctcgcttgccgcgctgcatacgtggaacaagatgcccgtcatcgagtacaaaccatcgggctcccaacttacggtttcgccccgatactaccgcatgggattcgtcggaggcgatgtctcaaagcccttgggacagttcgtgctgcgcggcgaagcggccttcaacctcgggaagcatttcagctacatacagcaagccgcctccacccctcaaaaaggattcaacaccatcaattggttggtgggggccgactggtatgcccctcatgaatggacagtgatggctcagttctcttccgagagtattttcaagtacgaaagctacgtcgcacagccccgccataattcgctccttacgctctgcgtgtcgaagaagttactggacagcaacttacagctttccgacttcacctatttcgacctcaaccacaagggctggttcagccgtttcacggctgactatgccctgaacgaccacatccacctcttggcaggctacgactggttcggaggaagcgagggtatgttcggcccgtataagcacaattcggaagtatgggcaaaggctaaatactgcttttgagatccacaccattttaataaccataaacaaaatttgaaaagattatgaagaagacatacgacagcagttaaagagaatgcggacttaagcaatcggaatcgtttaagttaaacggtgaaagacgttccaatggagcgatcaaagccgtttactgaagctgtttaagtagaacagcaaaattattcaaagtataaccatcaaaaacatcaaaagtcatgttactatacaacgtaaaaaaagaagagatgcgcatcggtaaacacaagggcaaaaccatgtattacgcctctcccattgcacaagacaagattaccaccaagcagctagaggatcggattgtcaatgccacagccctgagccgtgccgacgtgcggtcagccatcaccgccttggcgaaaatcgtacgtgaagagatgctcagcggcagaaccgttgacctggccaacctcgggtcatttaaggttgtatccaacgggaaacgcgtggaaacggaaaaagccgttaccgccgaaactctcaaaacaccacgcattcagttttttcccaaactcgaaatgcgcaatcaggcaaaaaacgtacagcatgtggtgatacgtgaaagcgaggccggatcggctaaaccgagtccgaatcccggagatttgcccgaagcacccgattctgctctttaatattcataacaagaaacaatgaagcagcaagtattatttttctttttcacgctgatgctcacaggtatcagcgtgtccgcccaaacaggtggaggacggattgcaggcgtggtcatcgacaatgcaggcgaagaaccactgcccggcgcaaccatcttcatcgaagagctgaaaaagggcattgtgacagacgggcatggcgagttcttactttccgatgttcccgcagccacttatacgcttactgtaaggtttataggctaccacacgcaaacccgcaagctcacggtgggtaaagagagagggaaaaaaatcatcatccgcctgaaagccgaagcaaaatcgttggacgaggtggtagtgatgggtaagagcgaagcccgtaagttacgggagcaggccatgcccatatccgttatcagcatgaaccagatacaaggaacggttaacaatgtacaagacattctggcaaaaactgccggaatcaccgtgcgtgccacgggtggaacgggcagtatctctcgcatatcggtgcgcggactggaaggcaaacgcatcgggcttttcattgacgggaatccgatgaacgacaattccgattttatcgacatcaatgatattccggtcgaaatgatcgaccgcatcgagatatacaaaggagttgtccctgccaagttcggaggttctgccgtaggtggtgcggtcaatattgtcatcaaagagtatccgcctaaatatttggacgtgaactattcttacggcagtttcaatacgcacaatgcatccgttgtgagcaagatgaacattgccccaaaaggaatcgagttcgggctgggaggtttttatacctatgccgacaacgactacaagatgaagtctccttttcaagaggggcttactataacccgcgatcacgacaagtttaaaaaaacagtcatcggcggtagctttaaggcacggaagtggtggtttgacttggtggagtttgaacccgttttcatacatacttacaaagatatacaggggatagaatcgaacatccggcatgcacacagccattccaacgcctttattttcgccaataagatggagaaagaaaacttcctcttagacggcctggacttggactggcagctggggtatatctataccgactatcattttgccgataccgcctcgcaccgcacacattgggatggaacgcattatccggcagtttccgaattcggcggcgaaatcggcaaatgggcttcattattgacgaatgaaaagcatcaattgcagcacaaattgaatctcaactatcttgtcaatgagaaccattcggtaaacttcaactctttgctgaaatacgctcatgccaaccctcgtgatgggatgaaggacaaggtcataggttatcgtaccgactttccaagcaatatgttcagttgggtggcaggcttgaattacgactatcgcacctcgaacgataagttccttaactctttcaacgtcaagtattactactactcgatgaaaacgcggatggcaagtgtcctggtaaagacagcagaggatatagacacacacaagaatgatttcggcatcagcaatgcacttcgctaccgcatcacacccagtctgatggcaaaagcttcgttcggatatgatgtaaggcttccatcggaagaggaactgttgggtgatggatacgtgatagctcctgccggcaatctcactcccgaacgcaatataagtgtcaacataggaatgttattcgatttaactggaaaagcctcctctaacttacagattgaactgaacggatactatatgcatctcaaagacatgattcgctttacgggcggattcttgcagtcgcagtatcagaacttcggcgagatgcggactcttggtatggaagcagaggtgaaagccgacatgacacggtggctctatggctatgtgaacgccacttaccaagatctgcgagatgtgcgtaagtatgaacaaaatacaactgttgccaaccctaccaaaggtagccgtatgcccaatataccctatctgatggcaaacgcaggattggagtttcacaaagaaaatctgttcggaggcagcgggatgaatacgcgcatattcaccgatgcttcatttgtggaagaatatctgtacgacttcgaacaaagccaattccagcagcatcgcatacctcgagccctctcgtgcaatataggctttgagcaaagctttggcaatgggcgctacttcattatgggaaaaataaacaacctgaccgatacaaaaatgatcagcgagtttaaccgtcctttacccggacgtagcttcactatcagattcagatacgtatttaagtaacaaattaacaatcattaaacaaaaaaagaaatgaaaaagaatgtattttttgtagcagcgatattcgctgcattgtgccttaactcatgtgacaagaatgatccggacaatcctattgcaggaggttcgggaaagattctcctaacaacagccctacccaatgcaacaggtatggatggaacggtttatatgcaactcattgatgagcctgtattaggcaagacgatggctaccaataacaacaatggtataaatgttccctttggcagttcttatcctatgataataggtcaggaagtctatgtcttcccaagctatcatttgacaatggacaaaaacgaactgattaaataccgtcgcacgaatggaattttacaaagagagggaagcttgcaattgcctgccaataacagtgccaacaatcttgtcaaactatcttccacaaaagcctatctatcgcttgccggactaggactgatttacatatttaatcccgaaacgatgcagaagacaggagagatcaacctgacctctttgggtattcaagataataatccggacatcggaatcatgattgagcgtgacggatatgtgtttgctggtctaagccagatggtgggaggttggacaagccctgagaattacaaacaagcagatgtagccgtcattgacaccaagacggacaagttggtcaagatgatttcagagaaaaccagtggtttttctcaagccacacgtccgatcgaccccaagtctttattcatggatgaaaaaggcgatatatacatttcttgtctcgggaacttcggaatggtggcaggtcataaggccggcatacttcggattaagaaaggagaaacagactttgatccaacataccattggacgataaccggagcttctatcgaaggagaagagaaagtagctggttttgccgcttcaatttgttatgcagccaatggcaaagcctacggatacattgatattcccggttattacaaaccaggagaaacgggacatggcgctatagcgagccgagctgtagtctttgatttatacaatcagaagatgaagaaaatagaaggattggatttgtccaatggctatggcgtgttagtgtctaaatataaagacggtttggcaatcgccaatgcttcaacgacaacaaaaggcatctattatctcaatcctcagacagataagattaatcctattcctatgataaccaccataggaaatcccatggctatagagtggttcggcaactaaacttataacgcgagttcgggatagcctccttccaaaaataaagagggtgtccgactgatgaagtgaccccaaaaatttggactggttaaacactatccagttatagaaagagttcggtattgtactggactctttccttttaaccgggacttaattcttttattattataataatctatatatccttccaaagcctttgtgaagtcttccggagactcgaacttttcagcgtatagaagttcagatttcataattctgaaaaaattctccatcatagagttgtccagacagtttccctttctcgacatactttgaattatatgatgctcttcaagccttttccgatatccgaagtgttggtattgctaaccttgatcagaatgaagtacgagtccgtcaaggttatcacacttatcaaatgctttatcgagcatgtcatatacttgttcaagatgaagtgcaccctcttacattttatttttttaggaatatccccaaataacttgatgtctgctttaacgatagaacctgttaggtgtttgcagcggacatcaccataacccattgccattaccactacttcttgcagttgttgtgagccctctcttaagttgatgaaaaacttccgctaattgtttaccggaacttcttgtgtttgataaccaatgaatgaaatgaccaaggtttcttcggaagatacattggctaatgcagtcggtgatacaaccgttgcttgtaccttttacgaagactgacgcaccggtaaccagaccgaaatcatcattcacggtaccggaaatgcttagctagaaatagcttgtgagctgattctattttaaaatataaatgttagttttatgttagataattccggatactttaatcttaagaatttgattataatacatatataaatttatttgttagatttaaagtttttttttataactgtaaaatacagatttagccttatatttacaatatgatattattgattttatctagtaaaaaagcttttgcattataaggacattcaattcttcttccagaattgtagtatatgttttataatcataccaataagataaaaaagataatggtcaaaataaagctctcaaaacaaaatacttgttgttcaattatcttataatagtaaaaatgaatttgttgattccgcaaaagagtttgtatcagatgttgaggtttcaacaatattaaatattacttttatttatagtaactaatttgcattaatatgagaaaggtatttattcttttgtttatttctttagcattgttatcctgtcaaaaagaggaaaacaatagaaaaacagagtatcaagtattaacaagtaaggacgcatccaaaccgtttagctgtcttggagagaaacgtattattacgattacgattataaaaaaaacattaatagatgatgttttaagttcagaggttccgattattcccagggatgtttcggtagaatttgataaaactcttttttctgatatagaaacaaaagtggagggcgatcaggtagtattaaatataacctcaaatattaataaagaagataaaattttgaatgctgatttacagatttcttactctactattaatggcataaaagtagaaaaaattccactaattatagataaaggaaagttgacatttgtgtataaaatccattcggaacagaatccttttattctaccagctgaaggtggtagatttgagtcaccttttacttgtaaaaaacagacatatttgaatggccagtttatagaggaaacttattcatcattaaacggattgagatttaaaacgataagtagtggtaatgtctggttccttacagtcagaaaagacggagaaaaaattggtttttacaaattttcttttgtgggagaaggaccatataaccaaaaaacagatccagagtgctattttaacatatatacccatgatgcagatttaattacagataatcctacagaaatattcagacaagattttatacaaccccagaccccgggtgaggattattataaaccttcccggtcctcttataaacatggcacttttgacttttaacgtattcagtattaaccttaattatattaattataaaacagtatacacgtttgttgattttgacaattatgtttttaacttcatatttcgatgacagagaagtaatgaaacaagaatcttcgccaccatctttagtaaaaaaaactcggcttatcgtaactagtgtatattcactactttctatatactaatgcacttcttaatgtaggttatgtagtaattcattatttgaaagctgataaaatatttttttttgaatattttatcagctttgtatattgcataatatgatataaatgagatttatttttgctgcctcttggcacgcagcatttctgccgccttcatttccgtccaacgctcgaagtcctccacctctttccttattttccgtatcagtttcctgtccctgttccactcgaagcagttctccagtatgtcaagcaccttagcgtccattcccccgtcacagacagcttccccaacaaaacccgttaaatcattgtgttaatatatatttcatgtatctttgcggcatagatatctgttgtgaaacaggaatctgcttatattattcttgcttgtgacaagccggaatcttataacttagtacaaaataaaaaaataaaagaggagagcttccgttctatggagctcctctcactttttatctctagtgcccgactgccttttatctttctactttcccaaaaggagtatccttcccgccagcatacagcacagcgaaaacagtatagccactaaattcttctcatttgtgcaaccccttctgtattcatcttccaaccttgtatatcgctaccgagatagaaaatggacagatgcacagctggtacgtcaattatcaataccaatatataccagttcatacgttctccccaataaaaagatcccctaatttatttctagttcacagtccaaatttatactttcctgtaaaatacaggatatagtcaagtcttcaaagtttttcccctaaagacacagaaatattacaaaaatcaattatcacattatatcttatttctgatgatacaaaaggagatggcaatctattttttaattctttagatgacataaagaatgcctttaaaattaattattcagaatctaatttgggacttcctattttttgtaagggatattacaaaaaacaattccgtttttactttaactataagttctggtagggaccatccaaacatgttaccagaccaacaagaccaaggggaagagtttagaaggatgtattacagctactaaagatgataaatgccaaaaccaaattcattgcaattggaattggggtaacagttattttttatttttagttcaatcaagccgggaagaatgattaataataaaagaatcaagtctttaaaggaagatatcaataaataactcttgcaacatgcagtttctttctggctgaatttgcgactctggagctatattctgaggaacggtttggcggcggaatatgccgttaaaccgtccggttttcgttaaacgaaaacacaacttgctgtcccctctacggggacaacgtttttaagtagaactgtagattgccccgactggtgcctccctcccgatggcaacctctcccgatttcggtctgcttcttcaggaaagttggcgttttttaccaatattccggaggcggaataggctgtagcttcctgtaatagtagagcattctacgattatccgacacatcagatggcttctttttcgtgataattgaatattcagagaactgaatattttgataatcggataatccgaatactattatatctgtagtctcttggaatgttacacagtgacaactgaataattggcgttttggatattgctatatttgtataatggataagcaattataaaaggctacaattataataggctgttattatacattccccatcagagagaaagttccttgagcctgctgccgtccagccggtgaacggataccgtaccgtcacagtaaatagcgaatgttggcatgttcccgtccttcgggaaagtgatggagccggtattgcagaccgctgtatgctcagtccgttcaagtttccaccggtgggtgtgaccataaaaaagacaatcgaaccttcccttcggcagtctgtcctcattgtagatatgtccgtgggtgagaaagaaacgttttccattatccaccaacagggtgtaatcggacaggatgggaaagtccagcagcatctggtccacctccgaatcacagtttccacggatggcgacaatctcaccggccatcgcattgagacgttctgcgatccctttcgggtcaagtccttgaggtatcccgttccggggaccataattcaggatatctcccaaaatacaaagcattccgcattgctgctccctgtaaaatgccagcacttgttccagtgccggtaacgagccatgtatgtcggacacaatcaggtatttcatcataatctattcgttacgggttaagttttcaatgcacaaaaataagcataattatctaatcttcctaaccggggaaacgatgagaaaaaaagacaggttccctgaactgtagattgctgtattgctgtccttgtagattgctgcaatgttataatcggatacataaaataagggtatttagccttagctaaactaagctaacagtctgacaataaggcttctaatactatgacatgtgggtttattatgctaccttagtggtataataataaaggataaaaagctatgaacgaacaagttagaaatatcttagaacagagtaccaccaagacgagcaagattgagcagctgctccgtctgggcctgatgcgcagggaaattgccgatttggtgacacgtggcaactatggttttgtatataatgttgagaagaaaatgcttgaaagagaaggtggagtcttgctgaacagggcagcaaccaccctgatggattacaccttcacccacaagttcggtattgagattgaagcctataactgtaatatggaaagactggcacgcgaattgagggaggccggtatccatgttgccgttgagggttataaccacacgaccaaggatcattggaagctggtgacggacagcagcctgcagggaaataatactttcgagctggtcagcccgatactggtgggtgagaatggcctgaaagagctggaaacggtatgctgggtgcttgacatctgtaatgcaaaagtgaatgacagttgcgggttccatgtccatatggatgcggctggtttcaatctggacacctggaagaatctgactttgacctacaagcatctcgaacacctgattgatgcctttatgccaaggacacgccggaacaatacctactgcaaaaccctctccggtgtttccgacgagagaatcaaatcggtaaggacgatagacggcctgcgggaggtctttaataatgaccgataccacaaggtcaattttgaggcttattctaggcaccggaccgttgagttccgccagcattccggtacgaccaatttcacaaagatggagaattggatccggttcttgaacggattaattacctttgcgaaaagatccagccttcccagccggatgacattggaggagttacccttcctggacgggaaacagaaattattttttaaacttagaactaaaaagttagcggtatgatacagacttatcatttgctggatggcggtcagataaccgccgccagcccggaagagttcgtccggctgctccgtgaggggagccggttcgactatgattgcacggatcaggagtatatggagaactttgcccggcgttacggggagctgcatggcgtgtcagttgccaccgatacccctgaacatttcctgacggacttgcaagccgccggttacgtccggtaaccggtatcgctcctttattattagtccctgcttcaaagatgaggcagggatttttcttttttcattgcaacctttcctgtctgcctgacggcgtttcctcctgtcaattcctgactatccatgactatccgtgacagggtatttcatcttttcccggcattcctttcttttgcagtgtagaacgatatacaattataagcattacagttttacagcattatatttttatctgattatataaagaaagcgtatgaaaaaagaaccgttattaattgcctttgccagccagaaaggaggagtcggaaagtctgccttcacagttctggtggccagtatccttcactaccagaaaggtttgaaggtgggtgtcgtggattgcgactccccccagcacagcatctcccggatgcgtgaccgggacatagaaagcgtgcaggaaagtgattttctcaaagtggtcctctaccggcagcatgaacaaatccggaaacgttcctatccggtaatcaaaagcaatccggagaaagcgatagaagacctgtaccgctacatcgaagagcaggatgccgtctttgatgtcgtactgttcgaccttccgggaaccctccgcagcgaaggggttgtccataccatttccgcaatagattacattttcatccccctaaaggccgataatgtcgtcatgcagagttccctccagtttgccgaggtggtggaggaagaactgattgccaggcacaactgtaacctgaaaggcatctatcttttctggaacatggtcgacaagcgtgaacggacagaaagctacgagtcctggaaccgtgtcatacaaaaagcggagttacacctgctggagtcacggataccggataccaaacgctataacaaggagttgagctccctgaagaacagtatcttccgttccacactgttccctcccgacaaccgccagataaaaggttcgggtctctgtgaactgatagaggagttatgtgccgtaacacatctggatgcctcccataccttataataaaaggaattatggacagcggaaaaaagaaatttgaccctcggagcattgatgagaaggccatattggatattgtcgccaggaaagggacgatacgaccggactcccctgcaacgagtgtatcccctaagccggaggatacggcagaggagattgccgggagtagcgaagctccggtctttaccaccggggaaatcgacgcttacagggcatccttcctgaatacggtcaggaccaaatcccgtaaatcattgcatatcgatgccgacctgcatcgccgcatctcttccttggtatgggcggtgggacgtggcgaggtgaccgtagccggttttgtaaaccaggtgctggcacatcatttcgaagagaacggcggattgataaacgctgtgctggagaagtattaccaatcactaaaatcataaggacatggaatacctttttattatcctgttcatctatgcctcttacctgagcattgaaaagtatgtgcatacaggcagcattttcacatggagaggcagaaaggacaagaaggaacgtcggactgcacctgccgccatccatccggcaattgctccgtctcaggcgggaataataggcaaaagccgataccaaatgcgacattcactgacaatagatgacaatagcggacagcctgaatcaggcatagaaaagagtgatacctttactcccgaaaagaaaacagagccggttctccgagtacacgaaccccttgataagaatacgaaattcccggaagttccggctctttttcaaaaactgaattatcctgaaattgattatatgcaggagccctctccttcttccggtgaagaaaaagaggagattcccgaacgctacgagattacgggatacgtacagcggagcaatccccaccgggcaaccggtgtcacctttgacgatatggatatgattgagaaagcaatggcatcggacgaacttacggaagcggaacaggaacaggcccggcagactttccaaaagctggaaggcacgaacatggaaagggtactgcaggcgagcgtcttgggaagcagcgataaactgaaacgctatatgcgtttgtatgtagaccggggtgaaccccatttattgactggaaagaatagggacgacattctccgggaatttgatattacggagcatgtgccccaataaaatagaacaagtaaggaatatgagacagtattatgattccggttgatccgggtgcagcgagttttaaaacagaatgtataacctaaaaagacgaaaaagcatgatagatttctttgactccggttgatccgggcaggacgggttcttgaaacgtagtgtataacctgttaaaaggaagatatagatatatgagaggcttctatgattccggttgatccttaccctttaccggagcgaacattaaaagagtgattaaccccttaaaaacggaggtatctatgattggttactatgactcaggttgatcctaaaaagacatcgtggttgcaaggacaaatccgcaggcaggaaacttcctgcggtttgtttgaaacaaggtttttattcacattaaaaaattagattgtatatgaaaagacattttaaaaagacggttgctcttatcgcatgaatagctgtttccaccctgagtgcctatgccgaaggggacggaagtgccggtataacaaaggccacatccatgcttaccggttattttgaccccgccaccaagttgatatatgcggcaggggctattgtggggctgataggtgccattaaggtatattcgaagttcagtagcggcgaccccgacaccggtaaaaccgccgggagctggtttggagcctgcgtcttcctcatcgtcgcggcgacagtccttcgttccttcttcctgtaatatagcaggctatggaatacaatatcaacaagggaatcggacgcaacgtggaattcaacggcttgcaggcacaatacctgtacttttttgtcgggggcttgctggccattttcctgctgttcgtcatcttctatatgataggtattgaccggtggttctgtatcggtttcggtgtcctctccgctttctctctgatcttcggggtgttccacctgaacaagaagtatggtcccaacggcttgatgaagctggccgcagtcaagtaccacccgtcctatatcatcaatcgcaaacgtatatcttccttatttaaaaaacgcattcatgagaaatatattaaaagccgcaacgctggaaagtaagtttccaatcctgtccgtggaggaagggtgcattctctccaaagacgcggacgtgaccatcggcttcaaggtctttcttccggagctgttcacggtcacttccgcagattatgcatccatgcacggcacatgaacaaaggcagtcaaggtactgccgaattatacgatagtacaccgccaggactggtttctgaaagaaaattacaaggccgacacgcagaaagacgggatgagttttttggaccgttctttcgaacttcattttaatgaacggcctttcctaaatcatttctcttacctgtttatcaccaagacgactaaggaacgcagccgcagccagagcaatttctccatcctctgccgggggaatataattccgaaggaagtccgggacaaagaaacggtcagcctgtttttggagagtgtcgaccagttcgagcgcatcctgaatgactcggcctttatccgtctggagcggttgaccaccgatgagatagtcggcacaccgcagcaggccggattgattgaaaagtatttttctctttcgcagcaggacacgaccacactgaaggatatacagatgagcgcgtcggagatgcgcatcggggatgatatcctctgcgtacatacgctttccgatgtggatgatcttcccggttccgtccagacggatacccggtatgagaaatactccaccgaccgcagcgactgccgtctaagttttgccgctccggtggggctaatgctctcctgtaaccatatttacaaccagttcctgttcatcgatgattcggcagaaatcctgcaacgctttgagaagacggcacgcaacatgcactcgctttccaaatacagccgagccaaccaacttaacaagcagtggattgatgcctacctggacgaggcgcattccttcgggctgaccgccatccgttgccattgcaatgtcatggcatggtcggacagccgggagaagctcaaggtgataaagaacgataccggttctgctctggccctgatgggatgcaagccccgttataataccattgacgcacctgccttgtattgggcaggtattccgggaggcgagggcgatttcccttccgaggagtcctttttcactttcgtcgaacagggagtctgcttctttacggaagagacgaactatgcggattccctgtcgccattcggtatcaagatggcagaccggacaaacgggaagcccctgcatctggatatttcggacgaaccgatgcgtcgtggtattacaaccaaccgtaacaagctggtcatcgggccttccggttcgggcaagtcattttttatgaaccatcttgtgagacagtattgggaacagaatacccacattatattgatcgacatcggtaacagttacaagggattatgtgacctgattcaccagcgcacaaacggtgaggatggcatatattatacgtatagtgaaaaacatccgatagcttttaatccatttttcaccgaaggtgcgcccataatggaagcgtagtaaatatctctttagcaagagattaggttagagttcaaatttcataaatgtaacaaaatgaaaaggaaacctactcccagccaacttatcctaaagggaaacccgagggggagtgcagcatgttggaaaagcgataagtcaacaaattgtcatgttgcgactgaattgcgagggggaacgatagacacgaggatgaagcctgattggttgaacgatagctcagtggcaaatgaagaagcgatggcgaaagacaattatatacgccatactgtgataccttttctcagtcgttcgggagaagaggcaagaactaattacagcacaaccgtaataaacggagaaaagagcgaacgtcgcatccgacagtctatcacgctaatagttattacgctaactaaatggggattgcctaaaccgaaacgccgtaaggctatagagtttgctcttgaatattcggcatggcaacggagcttccatagtagtccgaacaggggaaagccttgtacatggcgaagggaagcagttgataattttaatataaatcaaaggaaaacgtgagagacgtatgagaaatccagagaaagtattaaacactttatgtttacacagcaaagtttcggactataagtacgaaagactgtatcgtatcctattcaatgaagatatgttttatgttgcttatcagcgtatatacgccaagcaaggtaacatgacatcaggcgcagatggcaaaacaatagaccaaatgagcattcagagaatagaacatattattgaaagtcttaaaaatgagacttatcaacccaaacctgcaaagagggtatatattcccaaaaagaatggcggaaaccgtccattgggaataccatcttttgaggataagttagtgcaagaggtagcacgtatgatattagaagctatttatgaggggcattttgaaagcacctcacacggcttcagaccatacaaaagttgccatactgcattaacacatattcaacatcagttcacaggaacacgttggtttatagaaggagacattaaaggtttctttgataatataaaccacaacatactgatagatactcttcgagaacgaatatcagatgaacgtttcctaaggttggtgagaaagtttctcaatgcaggatatgttgataattggaaatataaccgcacatactcaggaacacctcaaggtggaattattagcccaatattggctaacatctatctcgacaagttcgataagtacataaacgagtatattgaaaggttcaataaaggtgagaaaaaaagacgtaatgcagtctactttcaaaagaatacccaagcggtaaatctaagaaagaaacttaaagtagaaactgacccttgtgtaaaggcagagctaacagaaaaagcaaagaaattacaaatagagatgcgtaatataccatgtagtcatgatatggacgaaaattacagaagaatgaagtatgtaagatatgcagatgacttcatcattggagttattggttctaaagtagattgcgaaaagattaaagctgacatcacgaaatacatgagcgatgttcttaatcttgaactctcagcagagaaaacgttgataacccatgcacaagacactgcaaaatttcttgggtatgaactctctgtgaggaaatcctatgcgatgaaacgaaatcgtaaaggagttctccagcgtgattttaatggtagagttgtgcttacgctgccaatagagaccgtaaagaagaagctaaaagagtacgatgccataagtttcgagcaagcaaacggcaaagaaatctggaagccaaaatcccggtcacatttaacagctatgcaaccacacgatatattagcccaattcaattgggaaatacgtgggttctataactattacagtattgctaataatgtatctgccacatgttctaagtttggttacatcatggagtacagtatgtatctaacacttgctcaaaagctaagaagtacaataagcaagttgaagaaaaagtacgagacaaacaagcagtttataatcccatacaaggatgataaagggcgacaacagtaccgaatactgtatgatgatggatttaaacgccaaacaacaaacgcaaacacaaattgcgacacacaaccatttaccgtaattgtgccacctccaacattggtggagaggctcaaaactaatcgttgtgaactctgcggagtagaaagtcctactgttatgcaccacgtccgtacactcaaaactctatcaaaggagtacgaatggaacagaataatgctaaacagaaaccgaaaaactctcgctgtatgtccaagttgcaacgcaaagatacaagaacatgaaaaataaagtgcatttatcaacggagagccgtatacatcgagaggtgtacgtacggttcgggggcaggctctcgaaaacctgtcgtagcaatacgacaaggcgtcgagtgccgagcctacacaaggtctttgacctggaaaagaaagagtccattaaaacgctgatcatgtcgctctggaaaagggatacggaagtcattacccgtgccgaggaagtagcactctcaatggcggttaacctgttccttgaaaagataaaggaggacaatgagctggttccttcctttaatactttctacgagttcgtacagggagagttccgtggaatactggaggagaagcattaccgcgagaaggatttcgatctcactaactttctgaatgtattggctccttattatcgtggtggagagtacgattatctgctgaactccgacgagcagctcgacctcttgaacaagcgttttgtggtatttgaaattgacgaaattaaggagcataaaattctttttccggtagtcactgtcatcattatggaggctttcataaacaaaatgagacgtttgcatggggtgcgaaagatgatagttgtagaggaggcttggaaggcaatcgcacgtgaaggcatggctgactatataaagtttttatgtgcgcccgtaaaggttgcatcgtaaatatctctttggcaagagattaggaaagtgttctttgaaaatgacctatcatcagccgacttatctgtttcgggaaaacttaaccgagcagggagtgtagcatgtcggaaaagtcataagtcagttagttaccaaactgcgactgaatggcgagatgaaaagatagatatgaggataaagtccgaattgattgaacgatagtccgaatggtcccccttgaggctatggcgtaaggtaactatcaatcgccatatcgtgatactacttcagtgtataggaatgaaggtagcaagaacttatcacgacacaaccgcagtaagcgagtaaaggacggaagtcgtatccgacaatctatcatgccaacagttacgatgtaataaacggggattacctatcccgaagtgccgaaaggctattaggttcgacctatgaaaattcggagtggtaacggagcttccatagtagtttgagcaaggtaacgccttgtacatggcgaagggaagcagctaattattaatacaattaacggaaaatgtgagagacattatgagaagtccagaaagagtattaaacagtctatcagaacacagtaaggatgcaagctataagtttgaacgtctttacagaattttgttcaatgaggaaatgttctacgttgcctatcagcgtatctacgctaaagagggtaacatgactaaaggttcagacggtcagaccattgacaacatgagcctgaaacgaattgaaaagttgattgatacgttaaaagatgaaacgtaccagccccaaccgtcaaagagggtgtacataccgaagaaaaacggtaagaaaagacctcttggcgtgccgactttcaatgacaagttgatacaagaagtagtaagaatggtactggaagccatatacgagggaaattttgaatacacctcgcatggtttccgtcccaatcgaagctgccatactgcattaactcatatccaaaaggagtttaatggtgcaaaatggtttgtggagggagacataaaaggcttctttgataatataaaccatgatgtattgataaacattctcttggagcgtattgcggatgaacgcttcatccgattgatacgcaagtttatgaaagcgggatatatcgaagactggcaattccacaatacttacagtggcacaccgcaagggggtatcatcagcccgatattggctaatatataccttgacaagctggataagtatataaaggaatacacagccaaattcgacaaagggaagaaacgaaaattcagtagagaaagtatggactttggcaatgcaagaaaacgtattgtgcgaagattgaagttcgtaaaagacgaaaggcaaaggacaaagctaatccttgaactgaaagcaatagaacaaggacgggctaaatatcccaacggcgaagaaatggatgccgattacagaagaatgaaatatgcaagatatgcagatgattttcttgtgggaattatcggaagcaagcaggatgcgcaacagataaaagaagatattaaaaacttccttgctgacagactggcattggagctgtccgatgaaaagacacttgtcactcacacggaaagaccggccaagtttctcggatatgaaatcactgtaagaaagtccaatgaccaaagacgggataaacggggtagattgagaagaacctatggtaaaagggtctgcttgaatgtcagtacggaaacagtccgtaaaaaacttttcgattggggagtattggaactgacaaaccgtaacggaaaggaaatatggaaaccgaaatgtaaatcgggactgatattcaatgacgaccttgaaatccttgatagttataatcgggaaatcgtggggttctataattactactccatagccaacaactgcgcccatgccttgaataatttcaagtacatcatggaatacagcatgtacaaaacgtttgcaggcaaatataagtgccgaacacgtaaggtaaacaagaaatatcgtaagaacggtaggtttatcgtaacgcacatgactaaaactggtgtaaaggaaagatacttttacgacggtggcttcaaacgaaagaagcccacctataaatcggaatgtgacattatgccacgaacaatttatactgcggggcggataagccttgttgaaaggctgaaagcccgtgagtgtgaattatgtggagcgacagacgaccttgttatgcaccatgtaaggaaactaaagaacttgcagggaaaggaaagctgggaacgacacatgattgcccgtaaacgcaagacgattgccgtgtgcaggagttgtcacaagaagatacatgacggaaagatagactgaaattagtggagagccggatacgctgagaggtgtaagtccggttcgggggcgagcatttggaaacctaccatagaaatatgataaggcgctgggtgcttagcctacacaaaacggttagaaagtattttggtgaggccgttgtcgtcactcaagaactggacgatattgtatcaagtcccattatcaaagacaccattatcaacaatgccgattgtaagattctgctggatcagcgaaagtatattaacaagtttgactccgtacagtccctgctcggattgaccgacaaagagaaagggcagatattgtctatcaatcagtccaacgatccggcacggaagtataaggaggtttgaataggcttgggaggtgtccggtccgctgtctatgccacagaaacctctgtcgaggagtatctcacctataccacggaagaaaccgaaaaactggaagtcacacaaatgacagagaagctgggcggcaatatggagcaggctatccgaatgttggcaagtgagaagaaaaagaaaaaataaacgattaaaataaagaagcaatgagaaagagaattataagcatgttgtttgtcctgtcggcctttatagtaccggcaagcgtacaggcacagtgggtggtgtccgatccgggcaacctcgtccagggtatcgtgaacagtgtcaacgaaatagtggagacctcggaaacggcgcagaatgccctctccacatggaaggagacctcaaagattttcgagcaggggcgtgagtattacgacaagctgcgcaaagtgaacgacctgatcagcggcagcgagaaagtcaaggagtccgtcctgatgctcggtgatatctccgagatttacgtgaacaatttcggcaagatgctaaccgacaagaatttcagccagcgggagctgaatgcgatagctgccggttataacaccatcatgaagaagagcagccgcagcattaccgagctgaagaatatcatcaatcccaccggcatgtccatgaacgacaaggaacgcattgacctggtgaaccgggtatacagggaaatgacacattacaaggaattggccaactactacacccgcaagaacctgcatgtatcctacctgcgtgccaaggagaagaacgagcagcaacaggtatttgacctgtacggcaaggatgagcgttattggtagtctacaattttaaaagaatcaattatggtattattatccatttcatttgaaaatatgcaccagattcttcggaatctctatgatacgatgaccaaactctgccacccgatgatggacatggcgatggcactcgctgcattaggagctttgttctatatcgcttaccgtgtctggcagtcgctctcccgtgcggagcccatcgatgtcttttcgatgttacggccttttgtcctgggcatgtgtatccttttctttgacgtgatggtgctgggaactctcaacggtatctttagccccatcgttcagggaaccggaatgctgctccgtgaccagaccttcgacttgcagaagtaccagcaggagaaggacaagctccgtgcggacatgatggctaagacgatgatgaccggacgtgtctttgcttccaatgaggagctggatgcggaactggataacatgggctggagtgaggaggagcatacggccttgcagaccatgtatgaggtttcgtatgccttctccctgcaaggtattgtccagatggtcatgcgcaaattgctggagattctcttccagtccgcttcgctggtcatcgacacgatccgtacctttttcctgatagtcctaagcattttgggaccgatagcctttgccctgagtgtttttgacggactgcagaacacgcttgtccaatggctggcacgctatatcagtgtctatctctggctaccggtggctgatctcttcggggcgatgcttgccaagatacagacgctaatcctgcaggaagagatgaacctgatggccgatccgatgagtgtcattgacgtggacggttcctcggccatctatctgatattcatggtcatcggcattatcggatatttttgtgtgcccactgtttcgaactggattgtccaagcgggaggtatgagtgcctataaccggaatgtcaacaatacgacatccaaggtgaccaatgtagccggtgctgcggcgggtgcttcgacgggaaatgtcggtgccgtattattgaaaaagtagaaattgaaaaaacataaaattatggaatttaaaagttttaaaaacatcgaatcctcgttcaggcagatccgcctgttcatgttggtctttctgggtatttgtgcctcactgactacgtatgccatctgaaagtcctacctctttgctaaccagcaacgggagaaagtatatgtattggatcagggcaagtcactcatagtggcgttatcccaagatgcggcattgaaccgtccggtggaggcccgcgagcatgtgcgccgcatgcatgaactgttctttacgctggctcccgataaggccgctatcgaatccaatatcaaccgggccatgtatctggcggacaagagtctttatagttattaccgggattggaacgagaaaggctattataatcgtctgatcagcggtaatattaaccagactgtcctggtagacagcatgcagtgtgatttcgataactatccgtaccggatcaccacctttgcccggcagatgattatccgaaacagcaatatcaccgagcgttccctggtcacccgttgcttcctgcagagtacggtcaggtcggataataatccgcaaggcttcatggcggaacgctttgagattttggaaaacagggatataaggaccgttgaacgctaatatattaaggtaatgaaaagcaggaagataaagacagagatcagcgaaaaactgaagaacgtttgcgaggagctgtccgaaaaagagcgtaagggagtgcttgtgggcatgctggttaccagtaccgttctatgtggtatcaccgtagcacgcgctttcgggcgttttctctctcacggcacacaaaaggagttgccgtttgtccatccggtggactccctccaccgggcggataaagacagtataatgtatcaccctaaaaccaacgagtaatggaagataaagatttggaaaagcccgaagcggcagaagaaacggcggtacagccggaaaacggcagagccttgaaggaagaacctgaaaaagagaagaaggtgctcacaccggaagagatggaaaaaagaaggaagttcattgtgattccggcctttgtgctggtcttcctgggagtcatgtactgaatatttgccccctccggcaaggaaaacgagacggaagcccccggaaattcaggattcaatgtgaacgtacccgaacctaccactgccaaactggtggataagaagaccgctgcctatgagaagcaacaggcggaagtggaggaagaaagccggatgaagtcgttggagcagcttgccgggacattaatgaacgaaggaaagggggcatccgataccggtgaaaaagaaaaggacggagaccggttgcaacagtccgttaatacctacgagcaaatctccgggcagttgaatgacttctatgagactcccaaagagacggcaaacagcgatttggaaagaaaagtagatgaactgaacaaaaagctggaagaggcggaaaaggagaagaacaaggcggctacccgagaagaactgatggagcggtcctacaagatggcggcaaagtatctgaacccggataaggatacggtccaggagaaagctgtcggaaaagaacccacggaaactgttccggttcagcgggcggagtatcagacgacctccggcctttcacaacctgttacggattccgcctatatcgcttcgcttactgtcgagaggaattacggttttaatactgctgtcgggaacagctaccaaatggggacgaataccatcgccgcctgcatttcggagaaccagatcattgaacagggaggcagggtaaaactccggttgctgcaacctctacaagccggcaacattaccgttccggagaacagtctggtaacaggtgcggcggtcatacagggagagcgtctggatatcctgatcagcagcatcgagtatgccgggaatatcattcctgttcagttggcgacttacgatatagacgggcagaaaggtattttcgttcccggatcggaaacccgcaatgcggcaaaggatgcggctggaacggtcagcgagagcatgggaaacagcgtttcgtttgcacgttctgccggacagcaggtggtcatggacctgacgcgcggagtcatgcagggcggcacgcggttgatcgccggacgggttcgcgcggtcaaggtgacactgaaagccggatataaggtgctgctggtcacaaagagacaataacggattattcactttaataaaaaagacaagacaatgaaaatagttatagcattcttgatggctgttctggcctcggtatccggtttttcacaggaggaaaggccggtaaatcccgtcaggattctgacggcgggccagcatatcatcccttataaaatagaggtcacttttgggaagacggtgcatatcctcttcccttcggaagtgcgctacgtggatttgggcagtaacaatatcatcgcaggcaaggctgacggagtcgagaacgtggtacgtgtcaaagcggcggtgaaggagtttccgggagagacgaacttctccgtgattacaggagacggctctttcttttccttcaatgtcgtttataaggaagagccttccacactgaatatcaatatggaccagtggatgaacccggacgagggagaaaagaaaggaggcagctccatccgtgtcacggaactgggcgaggaagatccgacggtcattgccagcgtgatgtacaccatccaccggctggaccgtagggacgtgaagcatatcggatgcaggcagttcgggatgcaggctcttttaaagggcatttatgtgcataaggacctgatcttcttccatgtttccctgacgaacaattccaatgtgcctttcgatgtggatttcgtgcgatttaagatagtggataagaagatagccaaaaggacggctcagcaggaaacttatattgaaccggtacgcacgctcaatgccctgacacgcatcgaaggaaagagcacgggacggatcgtgtatgcctttccgaaaattgtcattcctgacgacaagttgctggaagtggaaatttacgagaaagggggaggccgtcaccagcggttctatattgagaacagtgacctggtggacgcgcgtattgtgaatgaattaatcggtgagtaatcatgaaaagagttttatttattttgttatgcatttgtctgccctttgtggcaggcaaatcttttgcccagcgttacctgccggggcagaaaggtatccagcttacgttaggcggtgtagacgacttcggttcaaatgtgaagcatctgcatggtaatttccaggtcggactggctctgagtcggtataaccggaaccattcccgctggctgttcggggcggattatgtgaaaaagcactattcctataaggatgttgcgatccccaaagcgcagtttaccggggaggtaggttatttcgtgccgttcatctcggaccgtggtaagaacgtgttcttctctgccggtctttccgctctggcgggttatgagacgaccaactggaactgcaagctgctctatgacggggcgactttaaagaatgacggatgcttcatttatggttttgccccggctttcgagatggaggcgttcctttccgacaggctggtttttcttttcaatgtccgccagaggatattcttcggatcatccgtggggaatttccacacggtggcagctgtcggtgtcaagtacattttcaattagcagcaacagtatggaacaaggcaattggaacgtggatgagatgcttcattggctggatatgaaaataaaccgggaagaccggaacatacgtgaacaaagcaagaagatgaatgagaatttcctacactttttcgaatggaatgcggagagcctgtataagtctcattttatgtccgggtgttataagatactccggcaggcggtggacggggcaaagggcatggatacggtttggaatattgttgaggacaacattgcttactgtgagaacaaactgttgaacggtcaggtggattgtaacagttccagccggacaacgaatgttgcccatttcctgaagttggagtgtatgcagcagttagttagggattaccgggaattcgcgaatatccttgcgcaaacgcctcccgaagagaatttgcaacagacggctaataaaacagaaaagaagagagaagagccgcctgaaagaaagataaaaacgggcatcaggcgttagccgacaacggactcaatcaagtaaattattcatttagtaatacgtaaaatcatgaagatgaaattaataataagtggtatcatgctcacattgctttgcctgctgggtggctgtgatgataaattggaagtacagcaggcttatgatttctcgctaacgtcctggtatctccagaagaccatttccccggatgagaccgtggagattcgtctgacactcaatcgtagcggaaactatgaggaagccggctatcaaatcggttatatacagatggagggtagcggcgaggtgtacgacaagaagaaggtctatctggtgaaccgggagatgcaaccgttggattcgatagcggagttggatgacagcgatccctgccgccaggtattcacgctcttctatcataaccgaagcagcaagaatgcggaaattaaattcgtgatagcggataatttccatcaggaaagagaactggatatatcctttcagagcgaaactgaaacggacatggaactataaatcggacaacaatggataaaagtgatttaaggatcgaacaattgcagcaatatcttgacaagaagaaaggggttgtggaaagcgatataaaagagtataaccagcaactgggaaaaaactatcttcatttctttgactggcatgccgatgacttgtataaggcctgttatatggataagaattataaggccattcaggaggcgattgataccgctgaaacgccgaaggacattgaaggctatttgaagcgttgtaccctgtatatagaagaagatctcctgaacggtccgcttgtcaagaaaagtaccaacccgatgtcgaatatggcccattccctggagatggaatgcaaacaggagttactgaaggacctccggtatttaaacaggcttcttcagagtgagactgtaagtgaaagaataaggccgcaagaagcaccccgacaagaaattgtgcctgtgaaagaaaagaagaaaacgggaccacggttgagatagtatcaattgaaagcaataaaaaagctactgaatttttgtttcagtagcttttttatttatcccggtcttatattccggctataccagataagcctcaaaaagataatgtatgaataaccggcccttttccgtccagaccgtcaacatggccgtgcctgtttctcctgtgcggctttcccatacatgggtccgggttgctgtatagccttgattctggtaaggagctttgagcagccactgaccggattgacggaactggatgcctgcccatcggagccgcttgttcaacattccggcagtcattcccaattctttcgctatctgtgtggtcgtgtaggtgctttgggattgcaggactttgtcgtaatactgaacttttggggcctgtagcttgagtttcaggatagcatagttgttctccttctccaatgctgaaatacggctgtctcgctcttttatacggttctgtgcgagcaatatggcacgcgcaagcagttcattatccgtttcgccattcttcttaagaagatagccaccgttctttagtgtttcgggaaccagttcatcaaatatccagctttcgaatttctcagcggaaggcagcttgctaccggcaatcagccggtatacgtttccttcgctgatgtacttgattttctggacggcactgcgtgtaggggtgtcgtaaaccacgacacccattggtttacaatgtcttacgacggcatctctcggattggagtagccaagtgcggcggcaacatccgaggcgcagaaccatattttcccgtcaatttccagtgtccggatgcgtccgaactcgggatgttcaaatatcgatactttattcatgactgtttaatttataggtttcttctattgctttaaatatctcgtagactacctgggggacgatagcgttcccgtatcctttaatggatgcctgtcttcaccgagaaaaggagataccgtccaatcgggtggaaagcccatcatctcggctacaaacaggggattgagttggaaactctttccagtccgggcgaagaaatccggaaggctgttcttctgtggtatctttccccgtttcttcaggttctccagtgaaggtgcgcctttccaatcccgcgctgtcggtgtcggcatcacttgtccttctgccagccattgtaggatcgattcttccagattgttcccgtccgtgttttccagctcagtattgtccggtatcggttccggtagtatcccgtaaaagtccagaaaatccgtcaggccgttgggattcttctctccggctatctgggcatggggtgaggataaattcatcgatttccatttcctgactctttcggcatggtgtatctctgttgccactggcgttggcagaagcatcccatggattatctccggtagtccctgctgcctgctgcccggccccctgcgcttgtagtcctgtgccgtcacggtgggcaataaaccaaactctatcccgtctgtgaggtgcaccgacggaacaagccggtataagtaccggctggacggaatatccttcgcgttcaagatcacggcaaatggtttcaacaacatattgctgtcgtcttttaaatacaggctcactctctccgaatagagtggattgacttcccacttcagtctcctgaccgggctgtaccatcgtgaggatgccagcaacgttctcaccaatgacccaatcgggcctgatcttatgtatggccctgagcatgtgaggccagagatagcggttatcatccgctccctttctttggcctgcgacggagaatggttgacaaggaaaacctcctgtaaggacattgatttttcctctccattccctgaaatctgtcgttgtgacatctgtataacttttcgcatctttaaaccagtaatttagaatggtattacaaaaatcgtctatctcgcaatggaaggcattctgccatcccattcattcggcagccaggtctggggcgccgaatccactaaacagggaagcgtgtaccagacgcttccgctgtttcttgtcttgctcttcttctttcattgtttattcattatttagaggttcgaggttcattacttttttgtcgatcttacgatagatgctccccatctccagcatattttccaatcggagcaggtccgtgatttcatagacggtcatccctttctgtgtcgtgaagcggatatatcctttctgtcgctgtatctccacttcttcgggagtcatgtgcaggacttcacagatttcctgcaaggtcagggtaaggcttacttccttaactgtgtagatgtaagtcaggatgttcagcatctggaggcatttgcggtgtgatttgacgagtgctgcgaatttgtttcgttctatgacgattactttactttgattttccatgtgaatttttatttatgagttaatagaatcggatatgaaatcttcgtttagacattcttctctcaggaatttatatacgtcagaagcccagaagtaaatcttgccgctgagtttgaaaaatgggagtttcccggaattacgccagcggatcagtgtccggtcgcatactttcagcatcaggcgcatatcccggctgtccagcatttgcttaccgttgaaactggttactgcttccagagccgtttccagcttggcaatcagttttcgttgttcctcaaagttgtcctttatcattgctttgagtatctcaatatcatttctgttctcttccatacaatattcctttgttctaatgggttatttttctttcttcggttgcaaagttttcaaaattaggcatgaaaaaatagggctgacggtaaccgccagccccacattttccttgtaactcacttggtatcaatgtgaattttcagaatattttttcttcatcaggatagaaaggggaatacacgcaattctccttcttaaaaaagagactgatagaatgacagaggatatcggataaaaaaagggctgacaattaattgtcaacccttctataaatatgctatgattaacttggaagcatcaaaaacattgcttacctttgtgttacagagatatttgaaattatgcagagcaatgcaatgtgtagctgaacttccactactatatcgttacctgcatctttataaaaacacttttaatcgctgatttataaaagattaaaacgaactacactcttttaagccttgaaacaaagtgtttcaacgcaggaaacaaaaagtaccgtgccgggaaactatttttatgaccgattaatagctgatctttactccggcaaagaaacttctcggcaaagaaggaccgtaaatataaccggaatcccggttagctcctctgtcaaagtccttctgataagactcaaaaatattctgaactccgccgtttaattgcaaatcaaccgttttgtataacttgaagtcataagccagtttcactcccaaatcaaagaaacgaggtgttctgattgcttccgcttttctttcaggcattttacccagttcggcattctcggcggtgatatccatacgttgcaccaacatcctgccggtataggttcctgacaaagcaatagataaaggtttgatgggggtacaagtagcagtgaaataaccgtatgtatcgggagtacggaaaatcttcttttctgccggtgcatcgtcatgccacttatgcggttcatcgtaccggctacgttgtaaagttaatcccgcttgtatttgcaggatagaaagataagccactttaccttccagtgtcaatcccatcactttagcaccggggccattgctacgtgttttcactaatataccatcaccacggtcgtaaggtttgcccaatacaaaaacatcggtcagtcttgtataaaaaccctcaatcaacaaattcgtctggaatgctccgaaacgatgatacatatctgcagaaacactgaaactttgggatttctcttctttcaaatcctttgcacgctcgatcatagccaccgttccgcccacattttcaatatgcatatcctcatcaaaagcctgcggagcacgaaatccggaagaatagcttaaacgcaggttaatattctgggtaggattaaaacgcaagttggcacggggactaaagatcacattatccaccatattatgcttatccagacgaccaccaatcagaatcccccaacggtcgttcttccattcgttctgcagaaaagcactgtaaatattcaccgtctgatccgtgtgacggttatatccccacatgttatcttttaggcggtcacggttatattcaagccctgccgtgagatcagaaggcataaaaaagcacttgtcaaacgtatgtacgtattgtgcaccacccatagcggttaaatccgttgtctttccataggctttcagaggatcgttacccggtccgtaataactgtcccggtctgtattggcagccgatgcaaaaacacttagacggttcttttcatccggagagaaataatcgaatttcaaacttccaccatcaatagaatgttgcaactgctccgcaatatgcgcttcgtgaggaggacggttcaacatatcccctccacgacggaattcctgcatgtggtgatattcaaaggtcagtttggaataagtacttgttttcagataagagcggaaacccactgtctgattcttcaatttgggcagttcggtaaatccgtctccgtcataatcatatcccgaccgataacggttctgaccaaagatatacaatccggcacgatgatcgtccgtcaccaatgaagcattcagcgaggtgttgttatcgaatgaggagcttcctcctaaagaagttatggtgtgcgacagctgacccgaattacgtaaaggctctttggtgattatattaatcgttcctgcaatagctgaagaaccgaacaaggcggagcctcccccacgcatcacttctacacgttcaatcatactggcaggaatctgttccagtccatacactccggaaagggcgctgaatacgggacgcgaatctatcagaatttgtgtatatggtccgtccagaccattgatgcggacttgctggaagccacaattctggcaatttgtctccacacgcactccgggctggaagttcagtccttgtgataaagtggaagaattggtggtttcaaaaagtttcaggtcgacaacattcaccaaagtaggagccatacgacgtgtcgtttcactccggttggcggaaactactactccgtcgagagcaatcgcatcctcttctatttcaaaatcttcttccagtgtctttccttttttcagagttacgttgcgggtcactgtcttgtaacctactgaactaacttccagtataaaatttccttccggcaaattcttcaaaaaataatgcccggtagcatcggtcacggttcctatggtcgttcctttcagtgcgatagtgatgtacggaagatgttctttcgtttttttatccagtacatgacctattatattcgcatcggatttcttcagttcagggtagtccggacgttcagccaatgcgtatgacaagacacagcacaggccgaccaggactaaaagatatttcttcattgtcgttagtcttttaatgttttaattcgaaaaataataataaagggaaagggaagcagcgatcgttaatcgttgatcctaatacattaatactgttcccccaaaaagatagactaagcgataggaggtgctctaagagatattacgcccggacaagaacggtaaaattgctcaatttgcgggcggacaaacaggatgcataatagagataaagcagcaacagagaatgttggtatcaaaccgctgtcggtcaccaacacatgactcaagagatgaattagttggaattcaaccgtcgtatggctatgttcgctgccttttttaaatggatgtgaatggacaattgtaaccccgttgaccacatgggagtgagtaaacaaagtgattcctgccatgtacgagataaacagtacaggcagaaaccacttcattatatgtaggtacaattgtttcattcggtcatcttgcacatttattctgtgcacctaagtcaaggtttagtttgttttttgcaaagataaggattgtctccatgcaaaacaatccctatttataacgattttaaatcttaaccgaattttaataacttatcttcactccggcaaagaaacttctcggcaatgacggaccatagatataaccggagtcacggtcagcccctttgtcgaagtcgttctggtaggcattgaaaatattctgtacaccggcatttacctgcaagttcatcgacttgtaaagtttgaaatcataggcagccttcaaaccgatatcgaagaagtccttcgtattcaccgttatcggtttttcaaggaatcccggaactggttcgtggggaaccagcatcgaaccggtatatgtaccggaaagagcgatagataatggttttatcggggtataggttgctgtaaaataaccgtaagtattcggtgtacgcatcattttctttacagccggagcttctttgttccatacatgcggttcgctataatggctctgttgcagggtgactcctgcctgaacctggaatttagtcagatacgccatctttccttccaatgtcagtcccatcacacgggctcccggtgcattgtagcgtgtacgtgtcaggatcccatccactacctctccgtcggtaagggcaaatacatctgataactttgtataaaatccttctaccaaaaagttaacctgaaacgcaccaaaacgatgataaatatctgccgaagcactcaagctctgtgatctttcttctttcagattatcggccaattcaaccatcgccacattaccgcctacattctccacatgcaaatcctcgtcgaaagcctgcggagcacggaaaccggatgagtagctgaaacgaagattgatattttccgtcggattataacgcagattggcacgcggactgaatatcacatggtcaatcaggttatgtttatccaaacgaccgccaatcagaaatccccaatgctcattcttccattcattctgaaagaaagcactaccgatattcactttttggtctactgtacggtggtatccccacatattgtcttccagtttatcctgattgaattctattccggcagtcaggtcagcaggcatgaaaatacattttccgaaactatagacatattgcgatcctgccatccagtttaagtcggtagtgtttccgtaagcattcggatcttggccgccaccataatagctgtcacgattgatatgctgcgctgatgcaaacacattgaaacgatgtttctcgttaggtgagaaataatcaaatttcagtcctccaccattgatcgagtgttcggtctgttccgctacattcgcttcgtgaggtggacggttcaacaagtctcctcccctacggaattcttccatgtggtgatattcaaaagttagtttcgaatatgtcgttgttttcaggaatgaacggaaaccgatggtttggccgtgtatcttgggaatttcagaatatccgtcaccatcatggtcatacgcggaacgatggcgattctgaccgaagatatacaaaccggcacgctggtcgtccgtcacaagtgatgcattcagcgccgtactgttatcaaaagcatcgccatcaccaatacctgtaatggtatgcgataacataccggaattgcgcatcggttctttggtaatgatattgattgttccggcaatagcagacgagccgaacaaagcagatccgcctccacgcatcacttccacacgttctatcatgctggcaggaatctgctcgatgccatacacaccggaaagtgcactaaaaataggacgggaatcgagcaggatttgcgtataagggccatccagtccattgatacgcacttgctggaagccgcaattctgacaattagactctacacggacacccggctgaaagctcaatccttgtgccaaagtcgtagaattggtattctcaaagattttcagatccaccacattcaccagtgtcggagccaggcgacgggtagtctcgttacgattggcagatactactacgccatccaaggcaactgcatcttcttctatctcgaaatcttcttccaatgtgcgccctttcttcagcgtcacattccgtctgacggttttataccccaccgaactaacttcgagcacaaaattgccttcgggaagattcttcaagaaataatgcccggtagcatcggttaccgttccgatggtagtacctttcaaggcgactgttatatagggcaagtgttctttggtgtttttatcaagaatatggccaacgatattggcgtctgacttacgtaattcaggatgattaggatattcatgagcttgtccttcaagggcaggcaacaatgcgcagcacaagcagacaagcgaaaagatgtatttcttcatttttcgtttgttattagttttcgataagtactcacatggatagacagataatgccctacctcatgcaaggtacggtatcatcattcaaagaatggagaaacgaatagccggaggtgctctaagtcccactaccccatgatacggacagtgatagtgagcatacggcgaacggccgagcaacaaatacaataagaaaggaataaaaagggaaagagcaaaaactacggctgcaccgtctgccgttaaatgagacagaaaatgaatcagtagcagttcgactgtagagtgtttatgtgccgcccctttcttaaatgggtgtgaatggacgattgtcacgccattgaccacatgcacgtgggcaaagaatgtgaagcttaccagatacgacacaaacagtatcggtaagaagtagcgtgtaatattcaataacaatcgtttcacctcattttttctttgaggcggcaaagatacgaactatttatttaacaatcaatgaatctacaaaattctgttaatatactgccgaagctatgatttgaataaacagaatcagaaataccatggcaatcggataaacagttgcgtaagctacgctcggtatgttactgtccaccattgaatcggcagctgcaagtcccggagtactcgtcatacctcccgttatcgttcccagcaaatcgagcagactgattttaaataccagacgtccgacaatagctgctacaagcatcggtaccaatgtgatggcagctcctactccgaacatcagcaatccgctttcctggaaagtggctaccagattcttaccggcagaagttcccacttcggcaagaaaaagaagcagacctaactggcgcaacaactgattggcaggtccggacatagaccagatgatgggacctgtcttaccaatcgcactcaacacaagggctaccatcaatactccgccggtcagtcccggagagaatgacagactatcagagaaagatatatttattttgccgaacagcactcccagtacaatacccatcgcaatggggaagaaatccgtatcagacagtttcttcgcattgttacccagcaggcgggctactcctttaagtccttctttctcaccgacaaccatcaatttatcaccaaacttcaaagcgagatctggagatggagacaaatcaataccgcttcgacggacacgagtcactgtacaaccaaaatttttctgtaagttcaaatcacccagttgtttatttatcatgtcctttttggtcaacagtaaagattctatttcctgcgttttatccaaaggcagttcgccttcttctctcttaccgattaacacagcaagctgattcaatgattcttcgctacctacggcttgtatgtagtctccttcacgcagcactgtatgggctgtaggaatagatatttcatcattgtgcttcagacgggaaataacagcgcccgtcataccgcgtgcattaatttgcatcaggttacggttgaacacatgcgaattggtgacacggtagatacaagtagtcagttctggaaattgtccgcgacgttctatctccaggcgacgggcttctttattcaaatctacccgcataattttaggtaacagtttgacaaacagaatcacgccgattactccaaacggatatgcgataccgtaagcaatggatgccaaaggagaattggtactgtcaatagcaaccgccagacccggcgtactggtcaacgcaccggcaatcagaccgacaatactcggtgtatcaatatcaaatgcgtacttcaacccgactgcggtcaggcaggcagaacaaattataagcatagtaatgagaataagcgtctttcctttactgcggaaagaatcgaagaatccgggccctgcctgaataccgatggtaaaaatgaagagcaccaaaccgaagtttcctaattctttaggaatgataacaccaaaatgcccgaaaagaagggcaatgaaaataactgccgacacatcgagagataatcctctgatttttattcttcccagcataaaccctaatgcgacaatcaggaaaagggaaaaataagaggaatgcaataagtcagtaaacataaaaataaaggttagttagtttaagggcgcgaaggtacggattttatttaatcctcacaacattcgttgctgcaagtagctctttcgtcttcaaactccaaagtggcatgatgaatgcctgcctcttcgagtgcttcctttatatgatgtttcacttcctccaactgtgtgatattatcaatgacaacgtgggcagtcagagcggtttccgttgtgcttaacgcccaaatatgcaagtgatggcaattctccacaccgggttgttccacgataagttgctgtatcttttgagcgtctatccccactggtactccatccaaagacaaccggagactgtcatgaagcaatccccaggtagagacaataataataacagcaatgccaagtccgataatcgggtcaatgatgctccatcctgtatacgtaataataataccggaagcaactacaccgacagataccagtgtatctgctgccatgtgcaagtaggcccccttcacattcagatccttatctttatctttcatgaaaagccatgcagtaagcgcattgatgaccactcccaccccagctgtccatgcgatagcggaaccatcaaccgaaaccggatgaaataatttgtctatgctctcggcaataataatgccaacagcaatcaacagtataactgcatttaataaagaaacaagtatcgtactcttcttatatccatacgtgtaacgactattagggtgaactttctccaaccggaaggccaacatggcaagtaccagactggctacatcacccaaattatgcccggcatcggaaagtaaccccaaagaattataataaaatcctactccgaattctactatgacaaaagttatattcagagcgatgcctatgataaaagctttattgagcgatgtcaaccgatgactatgttcgtggtgatgatgaggttccatattatatattgttattatatctaatatacaaaaaacatcttacccggagattagttcatccttttccacttttggcagtattaacgactggttagtttttccataaacttattccggtctaccacataacgtatatgtgttccttcaccaattttaccctgtgaatcagaggctactacggaaaatgttaactttcgtccctctacctcaagaagtgtggctgttacaagaaccgtgtctcccaatgcagtgggtttaagatgtgtagtctgaatcattgctcctaccgttgtattgccttccggcagttgatcttcaacagcagacaaagctgcattttccatgaatgctaccatagcgggagtagcaagaacagggagatcacccgatcccattgccactgccagattttccggtttgaccactacttcctttataaattgcaatcctttttctaacataatttctgattctatattttagttatgactattcttctttttagcagactggtagaacagaaatgccaacagagctaaaaaagccaaaagtatcgtaatcatctctgttgtatatgccattggttctacccatatttcatgaaagatattccagcgtcccaatacttctacaaaagtccagaacactactaccgtagcaatagaaaagcgcatggcatatccccattgagtgattttcaacaggcgtttaaacataaaaaatgaacctgccagacagccgaaagcaactatagcagtaacagggctatgctcgccgacaaaattctcatcataacagaagagtagcacgagatagctcgtccacatgatgagatttaactccataaaagtaacaatcgaggtatgacgtgtcatcggccgtactacaatcgtggtggtactcttacggaaaaagactttttgaagataggtaaagaagtcgcatccgctttttatactgaaaatgtaaatcagcataaacatcacccaaaagccgaaggaggaaggcatgattaaatattccggttttgtcacgacttcaccggcagcgttcagcaatggttgcacttcataacgatgtgcataatatacgtagataaactctacccatccggtccagaagagtagtcctccgaataatccccataatgtctgtcgtgtatctccttttgcaaacactccaataatcaccatcaccagacctactgctcccatcgtgaaagccgcatagtgaagagctgtggatgagagcacatgctccataaaaatcattaatgcatgccccaacggcatagtaaacaatacaatcaggaaagaagtaatccctgtcaatacactttttctactgtagccgcctttcattttcttctcattttaattttttaatcatcaatttagtaaaagactgcaaaaataacgagttaatccactcctcccaatacctacatataattaaagcctctcattttttcatttcttttaggtatttcccccgtatatatatccccgtaactttgcagctggaaatttaattaatcattatctatcaaaattaagtatgaaaatcttaaacttttggatggttgcccttatggcactatctctttcttctactttcgtttcttgtagcaacaacgacgacgatgaacctaaccttgccaaagaaatagcaggagcttataaaggttattcagtcggcgcatgcaatatgttctctgattatttgttgggtgatgaatccacagcaacaatcactgccaacgaagatggtaccatcaatttggtatataaatccggatctggagatttcactctgaataatttaaaactttcttctaataagtctttcagcggttccggtgaagttgccatgtctatgggcggcagcacaggcggtagctacgactacacattagaaggtagtgtagatggttctaaagtgttaagtttgaaagccaatgttgatattcctgtacctatgggaaaaatggagattgatttcatacaaggagaaactcctgttggttattatataaaagacacttataaataccaaactaatttgagccttaaggtacaaggaggagaagttggctctactacagattgccaagtaaagattgaaaacccaacaggtagtaccgtaaatgttacaatcagcgggtttaataatgcaggaggttcaatgagtaactttgaaaaattcactgttaccagagtcaatgttactaaagcaaacaatggtagttactcgctcagtctgggtgcctttgaagcagatacccaaaaaactacaggtgaagctcttgctattaacggcacaagtctgaacggtacaattaatgcagacggaacagccactgttagtatcgttttctcaccgggaagtatgccaatgccaattacagcagaatttacgggaagtaatactcaaagtagcgcacaataaacgattaaatagcaatgaaaagaagcaggaacgctattttcaaatatactatagtactgggagcggcaatgtcgctctctgcttgtaatggaatatttgaaaatatttatgatgcccccatcgaaacggagatggaaatcaaggaaaatagcttttcacaagtcaagactgttgaatatacagaatgggcctacattaacctctcggaacgtacggttactaccgttaaaatcggagaggaatatgagagtcaaattcctgacaagtgggatttcgctattcatcgttatgatataaaaaccaacgagggtgctgcctacaaaacaacttacacaagtatcgacgagtttaaagcaacaggtaaactgcctaaagcggaagattttgtagaagatgaatggacaaccgataaaatagccattgacatgtcgggcatgatggacggaaacattatctacacagagtcttaccgtaatgctgttctttccagctggctggacgttaataccgcaacgatgcctccggtatacaccatgtcaaaccaagtttttttgatacgtttgaaagacaatacatacgcagcgatccgttttaccaactacatgaatgccagaggtataaaaggatatattgacttcaatttccagtatccgcttgagttcgaggacaacaacaatgaaaccaatcaacaagaatgaaacctacatttataatatcattattgcttttttcatttatagcaacttgcaccacattagcacaacactcaacttatcacatcagcggacgtgtaactgatacagaaggggaacctctccccggtgcaacgatttccatcaaaggtaaaggaaccggagccgtcacatccgtcgacggcacatatacattacaactccccggaaccggtacatacctcatcaccgcctcgtatgtaggctatcagccacaagaaaaaagactgactgtagggaaagagaaaagactaagtttccgcttatcggaagatcagtttgacctgggaacagtggttgtcacaggtacacgtactcccaaattactgaaagatgctcctatcatcactcgtgtaatcacagcagacgatattaagaaggtagatgcaaccaacgtaggacaattattacaatcggaactgccgggcattgaattttcctattcaatggatcagcaggtttctatcaatatgcagggattcggaggaaactctgtactcttcctggtagatggcgaacgtctggcaggggaaactttaaacaacgtcgactacaaccgattgaacctcgataacgtggaacgggtagaaattgtaaaaggggctgcctctactctctatggttccagtgcagtaggtggcgtaatcaacatcatcacccgtgattccgaggacccatggaatttaaatgtaaacagccgcttcggtgaacataacgaccaacgatatggcggaactttcagtttcaaagccggtaaattcaacagccagacgaatgtgcaacatacaatgtccgattcttacgacgtaccggaaggagatgtgacaaccatcttcggaaaccgcacatggaatgtgaaggaacgtcttgtttacagaccgattgaacagttgaaactgactgcacgcggaggttattatttccgcgaacgggataagaccggagacagcaaagaccgttatcgtgatttcagcggaggtctgaaagccaactatgatttcaacatcatgagtaatctggaagttgcctatacattcgaccaatatgataaaagtgattatctgacctcatacaaatacgatgtccgcgattacagcaatgtgcaacatagcgtacgcgcactctacaattacaccttcaacgataaaaacattctgaccgtaggaggagattatatgcgtgactatctattgtcttatcaatttaccaacaatggaagttataccatgcactcggcagatgcattcggacagttcgactggaacccgaccgaacatttcaacgtaatcagcggggtacgtttcgactatttctcacaatctaacgtacgtcatatatctccgcacatcggactgatgtacaaaatagccaactgctccctccgtggctcatactcacagggattccgctctcctaccctcaaagaaatgtatatgaacttcgacatggcaaatgccatgatgatttatggtaatcccgacctgaaatcggagacgagccacaacttctcgctctcggcggaatataccaagaaccgttacaattttaccgtttcaggatattacaaccttgtcaatgaccggatcgacctgacttcattccgcgacactgacggaagatgggcacagctatatatcaatacagagaaagtagacatcgccggtgtggatatcaacgcctccgccaaatatccttgtggtctgggaatacgtgtttcttacggatacctccacgagtttatgcgcgacggacaaatgaaattctccagtacccgcccacattcagcgaccgcacgtatcgaatacggcaaatcatgggataattatcaattcaatctttccctgaacggacgtgcgttatccaaagtagaaaccaataaatatgtgggcaataatccggatgaagggactaccggagtgacttatccgggatatacgatgtggaacctgacgttgacacaagggatctggaaaggagtcagcctgaatatggccgtcaacaacatatttaattatgttccaagctattatgatgcaaactctccttatacccggggaaccaacttctccatcggacttgcattagacgtagacaggttcttcagaaaatagaaaagataaaactacatacaaagctaaaaataagagaaatgaaaaagaaaagtaaaatcatcttaggtgtatgcaccgttgctgcagctctgatagggatgtccgtatggaatatctggttcagtcctacaaagattgctttcatcaacttccagaccatacagcagggaagtatatcgaaagccaacgacaatttatccatcaaactcagtgaagtatcgctcgacaacctcgaccgtctgaccggttacgacatggtattcatcaacggaatgggtctgcgtatcgtcgaggaacaacgtcaacaaatacaacaggctgccgacaaaggtattcctgtatatacttccatggctaccaacccggccaacaacatttgtaatctggacagcgtacaacagaatctgatacgaggttatctgaccaacggaggaaagaccaactaccggaatatgctgaattatatccgtaaagctattgacggtaaaatctcttccataccggaagtggaagacccggcagaaagacccagcgacatgctctatcacgccggactcaccaacccggatgatgaactggagttcctcaccgtggcaaattatgagaaattcatgaaggacaaccgtctttataaagaaggagcacgtaaaatcatgataaccggacaaatggctgatgccaccggacttattgaggctcttgaaaaagaaggttacaatgtttatccggttcagtcaatgacgaaattcatgtcatttattgacgaagtgcagccagacgcaatcatcaacatggcacacggacgcatgggagacaaaatggtggattatctgaaagctaagaatatcctcttgtttgctccgctcaccatcaacagcctggtagacgaatgggagaaagatccgatgggaatggcaggaggatttatgtcacaaagtatcgtgactccggaaatcgacggtgccatccgtcctttcgctctctttgcacaatatgaggatgaagaaggattgcgccattcgtatgcagtacccgaacgcttgaagactttcgtatccacaatcaataattatttgaatctgaatactaagccgaacagcgagaagaaggtagctatctactattataaaggtccggggcaaaatgcattgaccgctgccggtatggaggtggttccttccctatacaatcttctggtccgcatgaaacaggaaggatacaacatatccggtctgcctgcaaatgctgaaaaactgggtaaaatgatacaggctcaaggcgctgtgttcaactcttacgcagagggagcctttaatgactttatgcaaaaaggacatcccgaacttatcaccaaagatcaatatgaaagttgggtgaaagagtcactccgccctgaaaaatatcaggaagtggtggatgctttcggcgaattccccggcaactatatggcgactaacgacggtaaattgggtattgcccgtctgcaattcgggaatgtagtcttaatgccacaaaatgctgccggaagcggggacaactccttccaagtgattcatggcactaatatggctcctcctcatacttatattgcttcctatctatggatgcaacatggtttcaaggctgacgcactgatccatttcggtacacatggaagtcttgaatttactcccagaaaacaagtggcattgtgcagcaacgactggccggatcgcctggttggagcagttccgcacttctatatctactctattggtaatgttggtgaaggaatgatggctaaacgccgttcgtatgccaccatacagtcgtacctcactcctcctttccttgaaagcagtgtgcgtggtatttatcgggagctgatggaaaaaatcaagatttacaataactctcacaaagagaataaagatcaggaatcattagctgtcaaaacgctgactgtgaaaatgggaattcaccgtgatttaggtttggacagcattgccaacaaaccatatacggaagatgaaatcgcccgtgtagaaaacttcgcagaagaactggctaccgagaaaatcaccggacaactctacacaatgggagttccttatgaagcggaacggatcacttcttccgtctatgcaatggctacagaacctatcgcatacagcctgctggctcttgacaagcaacgtggtaaagcgacagatgccgttagcaagcaccgcagcctctttacacaacagtacttgactcctgctcgccatctggtagaaaagttgctcgctaatcctgcactggccacagatgaactaatttgtcgtacagccggtatcaccgcacaggaactagccaaggctcgtcaaatagaggcagaccgcaatgctccgaaaggtatgatggcaatgatgatggctgcatcggcaaagagtgaacaatccgacgaaaagaaagcaggtaaaggacatccggcatctgtctccaaagagggttctcctcatggtcaaatgcccgaaagcatgaaagaggccatgaagaaaatgggcgccaacatggatcctgaaaaagcaatggaaatggctaagtctatgggagcaagtccggaagcattgaagaaaatggaagccggaatgaaagctaataaagaaaaagctgccggatcttctgacaaacagggaaacagtggaaagcaagaaaagcctcaaggtatggctgccatgatggccgctatgggaaaagctccgaaagaatacagtaaagaagaaatcgaactggcacttgccatcgctgaagtagagcgtacaatcaagaatgtaggcaactacaagaacgcacttctgacaagtcccgaagaagagttaagcagtctgatgaatgcattgaaaggtggatacaccgctcctactcccggaggtgatccgattgctaatccgaatgctttaccaaccggacgtaatatgtatgctatcaatgccgaagcaactcctacagaatccgcttgggaaaaaggtatcgctttagccaaacaaacgattgatacttacaagcaacgtcacaatgattcaatcccacgtaaagtgagttatactctctggtcttccgaatttatagaaaccggtggggctactattgctcaagtactgtatatgctgggagtagaacctgttcgtgacgcattcggtcgtgtcagtgatctaaaactgattccttcagccgaactgggacgtccacgtatcgacgtagtagttcagacttccggacaactccgtgatatcgccgcttcccgcctcttcctgattaaccgtgcagtagaaatggctgcggcagcgaaagacgacaagtttgaaaatcaggtagctgccagtgtggtagaagctgaaagagtgttgaccgaaaaaggtgtcagtccgaaagatgcccgcgaaatggcttctttccgagtattcggaggtgctaatggcatgtatggtacaggaattcaaggaatggtggaatccggcgaccgctgggaaagtgaatcggaaattgcagatacttacctcaacaatatgggagccttctacggtgacgaaaaacactgggaagtctttcagaaatttgcctttgaagcagcattgaacagtactgatgttgtcgttcagccccgccaaagtaacacttggggagcattgagcctcgaccacgtatatgaattcatgggaggtatgaatcttgccgtacgcaatgttaccggtaaagacccggacgcttatcttagcgactaccggaaccgcaacaacatgaaaatgcaggaacttaaagaagcagtcggtgtagaaagccgtacaacgattctgaatcctacctatatcaaagagaaaatgaaaggcggtgcttctgcagcaagcgaagttgcccagactgtaaccaatacgtatggctggaacgtgatgaaacctgccgctatcgacaaggaactttgggataatatatatgatgtatatgtcaaagacgaatacaaactgaatgtaaaagacttctttgaaaaacagaatcccgcagctttacaggaagtgactgccgttatgatggaaactgcccgcaaaggatattggaaagcttctccggaacaactctccaatattgccaaactgcatacagaccttgtcagacaattcggtccttcgggcagcggatttaccggagacaatgccaaattacagcagttcatcgcctctcaagtagatgcgcaaaccgcagccaactacaacaaggaactgaaacaaatgaaacaagccaccctggacggagaagcgaccaaaggaggcatggtattgaagaaacaatcgagcgatgccgtacaaggggcacaggaagaacaaaattctttgaatggaggccttatcgcaggtattgttctggtagcatttgttgtcatgttgctaatacttaaaaagaaacggaaaaagtaatgtaatatggagttaattattcacatattaatgctgtttatcgtgattaactgcagtttcaaactcagtttctggaaactttggcaaaccgtaatatacagcctgatagccggtctttttgtagccggcacctggcagtatgctattctccagtcaaagacacagattgctgattatctgcagaacacggaagcattgcaaaacatggctattatcataacgcttgagtcagcactctgcttcggctattgcgtggctttcctgcgcggactttatggtaagaagaatttatggtgggcggaattacttcgctggtatcccagcttgttgctcttccccgtattattctactatctcacagaagctatcttccggttacctggcgtagacttttcagtgacagcctggtcatttgcagggatagtggttatcgccatcccattattaagccggctgatgaagtatcttgtacccgaagacgatctccggttggaagttcatttccttgtcagcttattcatctgtatcctcggactactgaccactgtcaatgggaaaacgacctatgccgccaccgaagaggcgctcaactggaaagcgattatcttgtccatcggtctgttcgttatcctgtttctcattggatttgcctggaacaagctgaaatggcctttattacaacgtaaagaattaaaaaaaagaagtaaaatcaatcaataaaatattatatggaactcatctctaaacttttattctgggtagcgaacagtttacttatacccgatatcattattttgctgtgcctgttcgttcgttcacttattttgatcggaggcacctacaacatgtacatgaccaaacgtaaaaatgacaaagcactggaccaactcattaaagatgcacggatagacgatctgaaagcagctttacccgacaaagacaattcactatatatgggttatctccgcgatctgctctaccatccggccagtgcagattactctgacttcctgataacaaaattcgagaatgaagcagagaaagatgtgtctctttctaaaatgctggctaagataggtccggttctcggattgataggaacattgatttccatgagtccggcacttgtgggactttctacaggagatatctccggaatggcatataatatgcaggtagtatttgcaacgactgttgtaggtttggttattagtgctgtgggactgatatccatgcagttcaaacaacgttggtatgccaaagatgtcaacaacctcgattatgtatcaagagtattaaacgaaacaaccggagagtccaataatgaaaagaaatagaagagtcagcaaattcctcaaagaagaggataccgacccgctaagtgtagtagtaaacttgttcgacgtagcgatggtatttgccgtggcattgatggtagcaatggtgatgcacatgaatatgacggaagttttcggacaggaagatttcaccatcgtgaagaatcctggtaaagaaaatatggaaatcatctccaaggaaggaaagaaaatcaacacttacaagccttccggtcagaaagaggaggattcagggaaaagaggaagaaaagtagggatagcctacgaactggataacggtgagattatttatgttccggaataaccattaaaagtatatttcctaccaataatcaatagtatcgggcaggacaatcctattcaggcattgtctgccctttatttctttcattttacattgataactatcagaacaaaacatggtttcttctttatcaaaacccgacaaaagacacacacattatcgcagaaatctactaatcatctgcctgttattaggtatcgttctcattactttctgctttttgctttgccagcacgacagtcaggatatggactgcgattgcttaagatgcctgttaagtgctcctccccaggagggagagtatctctacaaccgttatctgctcctcatcagtgttctctgcttcttgttaatattcctgcccatttatatattcgaacatcgacaacatataaaaaggaaataaaaaaacaagccaccgaaatgagtcactcattccgatggcctatcccctttaaacacctttaaacaaaatgaaaatatgcctcatatactaactaaactaactaaccctcgaggcatattttaaaagagactgtcgcatcaacctctttttattatagatagctttcgctctctaatcttatttacgagcttcagcaatatagccgagagcttcttcacattttgcagttacataagcccagtcttctgctgctaccttatctttcgggaacagtttagagcccatacctacgcagaatacaccggctttaatccatgcagtcaggttttccttagtaggttctaccccacctgttaccatcagcttagaccatggcatcggagccatcaaacctttcacgaagttagttccgtaaacatcacccgggaatactttgcaaagatcgcaacctacttcctgcgcaaaaccaacttctgacacagaaccacatcccggagtataagctaccgagcgacggttacataccttagcaatttcagggttgaacaacggacctaccacgaagttagcacccagttgcaggtacatagcagcagtagccggatcaacgatagaaccgataccgattgccatttcagggcattcttttgctgcgaatttaacgatttcagcaaatacttcctgtgcaaagtcaccacggtttgtgaattcgaaagcacgaacaccaccgtcataacaagcctttactactttctttgcaacttctgcatctttgtgatagaatacaggaaccattcctgtagagccgatcttattcaatacggctattttatcgaattttgccatcttattatttactatttaaatgaattgattttctttacttttcaactctccaaattatctctgtacgcgaccgcttgcgtcaccaccagccaatgcttctacttcttctacagaaacaaggttgaagtcaccattgatagtatgtttcaatgcagatgcagcaacagcgaattcaagagcagcaccctgattaggtttagtcatcaaaccatggataataccgccggagaaagagtcaccaccacctacacggtcgataatcggatcgatatcataacgctttgaagtatagaattcttctccgttgtagatcatcgctttccaaccgttgtgagtagcagagaaagattcgcgcaaagtagaaactacatatttgaatccgaattctttcatcatctgctgaaagatacctttgtaaccttcagcatctgtgtgaccagcctcaacgtcagcatccggcttgaagcccaaacaaagttctgcatcttcttcgttaccgatacatacgtctacaaactgcatcaacggtttcatgatagactgtgctttttctttagtccacagtttcttacggaagttcaagtcaacagaaacagttacaccgtgacgttttgcagcttcacaagccagacgagtcaactcggcagccttgtcagagatagccggagtgataccagaccagtggaaccagtcagcaccttccatgattgcatcaaaatcgaaatcagcagcgtcagcttcagcaatagcagagtgagcacggtcataaataaccttgctaggacgcatagaagcaccagtttccaagtagtagatacctacacggtcgccaccacgagcaataaagtctgtcttaacaccatatttacgcaatgcgttaacagcagactgtccaatttcatgtttcggcaatttagttacgaaataggcctcatgtccgtagttggcacagcttactgcaacgttagcttctccaccaccatatactacatcaaaagaatcagattgaacaaaacgagtattacccggagttgataatctaagcatgatttcgcctaatgtaacgactttctttcccataatcttatgtttcaatttctaagttattaatattatgaactttcaatttatcattccagccccacttcaagggttaacacattgattatatgaacattaatctataacacaactaatattacatacctttcgtgtgcgggcacaaagatacaacaattttcgtaattacaaaaattgttatatatttgtatcgaaaatattaagattattattgtgtgcgagcacaaaaacctatataaataaaggttatcgtatgaataaattgcccgaaaggatcagaatcaaagacatcgcccgtctagcagatgtatcagtgggaacagtagaccgcgttattcacggacgtagcggagtgtcggaggccagtaagaaacgcgtagaagaaattctgaagcagcttgactaccagcccaatatgtacgccagcgctctggcttccaacaagaagtatacgtttatctgccttttgccggagcatctggaaggcgaatactggacggctgtagaaatcggtattcatgaagctatcgcgacctattcggatttcaatacttcggtgaaaatcaactattacgatccatacgattatcattcattcgtcaacgccagtgaagccatcctggccctgcagccggacggagtgatggtagctcctaccgctccgcaatatacgaaaggattcaccgatcagttgcaggcactggatataccttatatatatatagactccaatattaaagaggttcctccccttgccttctttggtcagaactcacgtcaaagcggatatttcgctgctcgaatgatgatgttactggcacgggaggaaaaggaaattgtgattttccgcaaaatacatgaaggaattgtaggatctaatcagcaggagaacagagaaatcggttttaggcagtacatgaaagaacatcatccgtcttgtactatactggaacttgacttgcatgccgaacgcaacgacgaagataacgagatgctggacgaattcttccgcacttatccgatggttaagaacggaatcactttcaactctaaagcctacatcgttggcgagtacctgcaaagccgtggaaagaaagacttcaatctgataggctatgaccttctggaacggaatgtcacctgcctgaaagaaggaagtatctccttcctcatcgcccagcagccggaactgcaaggagccaatggcatcaaagctctatgcgatcatcttattttcaagaaagaagtgactcgtatcaactatatgcccattgatctgttaacagtagagacaatagactattaccatagcaaataacaacaaagtacaactttacaagtacattacatggaaacaaagtatttaagaattaatcctgccgacaacgtcgccgttgccattgttaacctcccggcaggagagcatctttctgtagatggcattgaaattacattgaacgaagacattcctgccggacataaattcgcattgaagaattttgctgaaggcgaaaatgtaatcaagtacggttatcctatcggacatgcacgaatggctaagaaacagggtgactggatgaacgaaacgaacatcaaaaccaacctcgccggattgttggattacacttacaacccgattcaggtttctttggatattcctcataaagatcttacattcaaaggttatcgtcgcaaaaacggtgatgtaggggtaagaaacgaaatatggattatcccgacggtaggttgcgtaaacggtatcatcggtcaactggctgaaggactgcgtcgcgaaaccgaaggcaagggagtggatgccattgttgctttcccacacaactacggttgctcgcaacttggtgacgaccacgaaaatacaaaaaagattcttcgtgacatggtgcttcatcccaatgcaggtgctgtattggtagtaggcttaggatgtgagaataaccagccggatgtattccgtgagttcctgggcgagtttgatgaagaccgtgtgaagttcatggttactcaaaaggtaggtgacgaatacgaagaaggaatggaaatcctccgcgatttgtatgcaaaggcttctaaagatgaacgtaccgatgttcctttgtccgaactgcgtgtgggattgaaatgcggtggttccgatggtttctccggcattacggcaaacccgctattgggtatgttctccgatttcctgattgcacagggaggtacaagcgtattgactgaagttccggaaatgttcggtgcagaaacaatcctgatgaaccgttgtaaaaacgaagagctgtttgaacagactgtccatctgattaatgacttcaaagaatacttcctgtcacatggagagcctgtaggtgaaaatccttctccgggcaacaaagccggtggtatctctactctggaagaaaaagcactgggatgtacccagaaatgtggaaagagttatgtatccggcgtaatgccttacggcgaacgtttacagaaaaaaggactcaacctgctttctgctccgggcaatgacctggttgcagccactactctggctgcgagcggatgtcacatggtgcttttcaccaccggacgcggtactcctttcggcacttttgttccgaccatgaagatttccaccaattcaaccctggctaaaaacaaaccgggatggattgacttcaacgccggtgtgatcgtagaaaacgaaccgatggaaaagacttgtgaacgcttcattgattatatcatcaaagtggcaagcggtgaattcgtaaacaacgaaaagaaaggctatcgcgaaattgctatctttaaaacaggggtaaccttgtaaacaagtcgctatctgatacaacaaatatatcgaagataaaagatacattgttaaaacaatagagttgctatcccgttcaacttatcattgagtgaaggatagcaactctttttttgttataccatatcatcgcctgttttcttaaacgtaacgcggattgttttatggaaaggaataaaacgagaaatcacagctatgacaacagatataaccaacaaataacccagaatctctttcagtgccagcaacaggctttgttgttgtaacatattatataaggagttggttgccaactgcgcagcctcatcatacggatgtccctgtgtcatcgcattgttcagcgactggctatagcgtgctgacgacaatggatcagtagcagttatagtctccgacaaagaatacatatatttttgttgcagtcgatacagtacattactataaaaagaagtcgccatgataggtgccagcacggaacggaaaataatcaggaagaaagcattcgacaataagtatttcggattcaagtcttccacggcaaacagggcaaaagcaataatcaaagtcaacatacccaaaccacgaaagaagataggcaggtagagcatctcatatgtactatccggagaaatgccaaaatacaaaatggcaaagaaaatcacaaagcaactcattcctcccgctatcagaaaacggaaacgccaccgttgccagcgaaaccaccaaaaacaaataaaggcgccgactacatatcccggaagcaaataaatataaagagaataggtatgcgtagtatctactttcagaataacagtcagatagttagtcagcaaagtggttgatgtactgaaaaacatcacgagcatcatataaaaatagcccacaattgctttgggttggaacaaaggagccagacttacataaggattctccaaacggctctgataccagatgaacagcgcaatcagcataggtgctattacaatataaatacatatcttaccggaagccatccaatcgagcactttgccataattgataacgtacatcaacatcagcaacccggccgaaataacaaacatctcacggatatgcagatcagaccatgcgacagcttttatgggacgattatgccggaaacagatgataacaaacagaatggaaatcaagatcaataccatcataaagtagtacatatacttccagttataatgatacgccagtaaagccgttaccagcatcgaagcttgtcccccaccgtaaaccaacggataaaaataagaatagaactcgctacgcacattcttcggactgaaaatcttctgggcataacgaataaaccacaacataagaaaccctttcaagaaaccgacagcaaaactacagacaatcaaaatatctgcgttttgcgtacgtgcacaaacccaactcaagaagaattgcagtactaaatcaatcaataacagagatttcacggaaaaggctgccaacaccttaggaataatcgggtatgcgatagccatacctgccgaagcagcgtaataccccatcgtaatatcttccgaattagtacccagcgtgttcgacacttccagcatactgcctgtatacgagccattgagcatagtgaccggaagaatcacgatgaaaatgctgataagtccaagccaatcgggcacccattgacgaacaggtgcctccaattccttcatggtaatcatttgcgtaaagcttctgtttccaccatcatcccggctctcaactgtgccatttcttccggagaaacatcttccaagtcgatacgcacagggattcgctgctgcacctttacaaaattgccggcagaattatctgtaggaaccaaggaatatttagacccggttgcctcggaaattgcagtgacttccccgtgaaaaatctttccgggcactgcgtctactttaatacgcacctgctggccaatatagatattagcaatctgcgtttctttataattagcggtaatccacttgtccttgttacgcaccaaataagaaatagtctgtccggtctgcacatattgaccgggttcaagcgtacgcctacccatatatccatcataaggagcagtgagaaccgtataagacagattcagcttagccaaatccaggtctgcttctttacgcaaaatggcagcctccgtaccggttgttttcttacttgtctccgcatattgtgataatgccgcctgtttctgtgcaactaatgcctgataacgtgcctttgctgcctcataagcagctttcgcttgctcatactgctgttccggaacagattcttctttcaacaaacgttcaaaacgatgataatcctgttccaattgccaaagtttcgctttcgcttcagcgatgttggcatcctgtacggcaatattcgtatgggaagtttcaatacccgaatgaagaacatcctgcgagccatgtgcatccaacaatgcagcttccgcttcctttaccttaatctgatattcacgattgtcaagcaccagcagagtatctccctgatggacatattgatgttccttaaaacgaacctccttgatatagcccgaagcccggccattcaaaggagccacatattgatctacaaaagcatcattcgtcacttcgtaattaacgtaacgccaaaagtaagtagcagtccaccaaagtccggagactgccaaacagatacataccaaatttaaaacgatattacgaactcttactttctttagtttctgctgtttctctttcaattcatttgccataacaattcccccataaatcataattctaaaatcataaatccccacacgccttccggagttgataataagtataaaccacacgagtgcgcgcagtgaccagctgcaattctacattcaaacgaacggagtttgcatcgagcaaatcagtcaggatagccagctgattcaggtaacgattctgcatgatacgataattctcttccgcttgccggacagacagctttagagcctccactctctgcaacgcttcccggtggcgtaaaaatgccgaacgtacatccatgcggattccctgcatcttctgttcctcctcatttttccgcaaagataccatcagtttactctcttttattttatggttgttcttgtaaagtgatgataaaggataggaaaccgacacacctacattccagttattattatacatatccgccaatgtacgcgagatggggcgtgccaaggtgttcgatgcatagagcgacacactgggaagagaaaaggacttgacagagcggatctcatttcttgccaattcagtttgtgcacgaagcagcttcatcgccggatcgttcgcataagcctgaacgatataatcatcatacggctgcaaggcaactgcctgataaagaatagtggtatcgggttttaataataaattctcatcctgtcccaataagatatcgagctgctgcgatacaagcgcaatgctgttttccacttcctgtagagacaagcgatcattagtcagctgcatttcactccgcaacacatcattgttcgttatcaaaccctcctttttcatccgccgtatatcgtgcagccgaagttctgactcctcaatattccgcgccagtacttcatgctgcttaaacagactaaacagattcatatactgattcaataaccttagctttatttccgcctgatcggtcaatgtctgtagtttggcaacttgcttttctatatccgccttatgaatagcacttcggattttgccaccctgatagagaggctgcgccaaatcaatcgcatagttttgtgaccagtccggtgcttccggatagacaggatcggataatccccgttcccaaacgacgggttgtcctacaaatccccctttcagtccaatctgcagttccggcaactgcgcagaacgtgcggttcgcgtccgctcctgcgccatggactctctcattgcgtctgcctgaagttgcaggctatgctgcactcccctttcaaaaagctgatcgacggtaagaaacaaagaatctgtttgtgcgttgatggaggaagtgcccaaaagcaggcaggacaaagctgccccatattttttatacattttcaagtacatcgcatacaccttttaattcagataacatcgtttcaatgctttctataccaataatcttttctgcgtatacataaacctgatcgagaatcggacggatctggtctttaaactcctccccttcgggagtcaggaataccagtttattgcgacggtcggcgggatcttctttacggtaaacataccctttcttttccagattattcatcaaattggtcaaacaggctttatcttttgcaatacgttctgccagtatctgctgactaattccctgctcgtgccataaactactcaatacctgaagcatctcaaacgtaattcccgcgttattttttctcaatgtccgttgcatagaccggcggaaagccatacgggtacgaacaatctgcaacatgagttctctaaactctgctccttctctcattttctataacctttttacctgtttcgtttcggcggcaaaggtacatatttccgccgaattagtcaaacatttgactaatttcattttgacgtcctgctcatataattcctgaacgttcgtttatttattcattaaatcactatatattaacatcttatcataaaatcctattctttattatcaaaatatccaagcaaaaagtttgttcatctgaaatcttttgttttactttgcactacaaagtactttttatatgaataaagataaagcattagaatcggtaaatgagataaaagagttgatggaaaagtcctcaaagtttatctctctaagtggtctcgctgcaatcatggcgggcatttacgcattagctggggcatatatcgccacagaagttattacaccgggcactcatttaattgttgcccttgaattaatggctataatagccgcgctcgtattggtagccgcggcggtcacagcctgcatcctgtcctattacaaatccaagaagacaggacagaaatttttcagccgcctcacttaccgggcattatggaatttctctcttccgatgctgaccggaggtgttttatgtatttccatccttatgcacgagtattatgacatcctggcttccgtgatgcttttattttacgggctggcattggtcaatgtttccaagtttacttattccagtatcgtatggctaggctatgccttcatttgtctgggcgttgtagactgtttttgggaaggtcattcactactgttctggaccatcggtttcggcggtttccacatcctctatggtatattgttctatttacactacgaaagaaaaagatcctaaatgatagaagcattccaatatattaataaagcattcgaaagcaaggtccgactaggcatcatggctattctgatggtaaatgaggaagctgatttcaattttctgaaagaacagctctctctgaccgacggtaatcttgccagccatactcgtgccctggaagaactgggatatatcgtatgcaacaaaagttttgtcggacgaaagccacggactgtttttcaggcaaccctgcaaggcagagaagctttcaaatcgcatattgaagccttagagaaatttctaaaatcaaaataaataattcatcaaaacactactggcttatggacgctttcaatgaaaattcaaatgagcaacaggcacagcaacctatgggatgcctccaccgtttctccaaaacaatcaaggttgtcatcatcggattattaatccttctcctgatgatacccatgttcatgattgagaatcttatttccgaacggggacgaacccaggaagaagctatcgacgaggtaagtgaaaaatggagtcttgcacagaccatcactggcccctacctgaatctacagtatccggttgtcactgaaaacaacggcgagaagaaagtttccatcaaagacctgatacttttccccgacgaacttacgatcaacgggcaactgaagactgaaatcctgaaaagaagtatctacgaggtcaacgtatatcaatcggaactgacattgaaagggtcattcagttcggaagaattgaaaaagagcagaatagatatggaacagctgcagtttgacagggcagctatttgcctgaatctgaccgacatgcgtggcatcagcgaacaaatcagcatcactttgggagattcagtttacatcttcgagccgggtatggacaacagaggcatagataataccggagttcatgcgatcgctaatttgtcggagttgaagcagaataaaaaactgccttatgaaattaaaatcaaactgaaaggttcacagtcactcaactttattccgttgggtaaaacaacccgtgtagatctgaaagccaactggaatacaccgagctttaccggaaactatctgcctaacaaccggaatattacggagaaggaattttccgcgcaatggcaggttttaaacttgaaccggaattattcgcaggtgatggctgactacaacacctcgaacatcaaagatattgaaaactccagtttcggtgtgaatttcaaaattccggtggaacagtaccagcagtccatgcgctccgcaaagtatgccattctgattatcctactgactttcggagtgatcttcttcactgaaatcatgaacaagacccgtattcatgctttgcagtatttattggtagggctggctctctgtctattctacagcctgctcctctccttctccgagcacgtcggtttcaacccggcctatttgttatcttctgcactgactattatactggtaggcggctatatgttcggaattaccaagaaaaagaaaccgtcattaatcatgtccggtctattggctatactctatatttacatctttgttcttatccagctggagactttcgcattattggcaggcagcttaggactgtttatcattctggcaatagtgatgtatttttcaaagaaaatagactggtttaatgaataatcggcttttctattgaaacgcttgacaaatggctttttattttgtatctttgagaaaacaaaagcaataagagaaatgaaaaatctaggaaaaatagagacataaaggacctttaaactgatacattttagtattagtacagatatatcatagggcaatgatctaacgatcattgccctattttgtttatatttttacttaactcattctatagaatctctaaaaatgctcaaaatagtttttaataaactctgataccgtttataataaactatcaaaaagtttattataaaccgaaattacgtttattaagaacatagtctttaattgtaaaaataacaaacgtgtttcatacaatagaagactacaaataagcgagtttatttatacagtaatataaatatacacattccttatttcatccaaacaatcggataacctaagtctcttttgatagcttccatttctgcactgtgccacatttcatgtttaaagctccacgacaatgcttcatatttagtttccgcaacaggatgttcaaacggaagaggttgcaagcactctgccaaaacatcatcattcagagtttccagattttcgatacagatctgatgaactatttccatttgttctctcaattcagcaacagaaatcaagcccttttctatggaacgatgtaatgtccccatgccattaaacattctattatatttttggataggcactaatcgtcctaccctttcgttcaccccggtaatagctgtcagtgtatggaaattctgcgaaacaagcagatgtcccacttgccagataaagttagaatctgttccttcaggaataacataccacaaatcttccggcaattcagacatcaaacgattcacaaatgtgcgagcttctacaatctgctcctttaaaaagtcaattttactcataactatatgtttttaaattatacatatagttagtggaaaggtaaatgagctttgtgacaacttactgcaagaatttctcccaataatttttcctcggcagttctttttcaaacttcctgtataaatcggcaagcctcatcattcgttgcaccattgcatattctttatccatatcaatagaatataccggtttgcaaatacggcatttacaagcaccatcgggattatacaacgggcaagtatcattcatgaaagctgtgattttctgaatggaacgattatagacttgccgtacattactttctttccattccatgatttcgccaatctgccgataaggcaacccgatgttttctctaaagataaaaatcagacgagcatcattattcagacaatgatttaaagcggtaatacaccagtcgcacctttctttaatccattcccgcttcgcttcttccccaccggaatatccgatttccggcaacgaacggaaatattcgatttccgacattttcacctgcttttcacatgctgcatatctgccaatagtgcgacgagcgacagtatatatccatgtagaaatctccgaatcacctttaaagccactgaagcttttacaaagttcataccacacttcctgtgccgcttcacgagcgatttctttattctgaatcatccggtgagcaattgtggaaatcatatttccatattctttcaccaaataattgatatctatttccatcatcacacactacaatgttttcttcaaatatatcatatccactaactgcatatcatcctcatacatcggatgatcgtagttatctgtaaagaaattctttatccggtgggaaatcgcaaaactgcaatgttcatagaaagatctggaagaaggcacatctcctgtacccaccaacatttcagaacacttcccctgataatattcaaataaaaactctattaaacgttttccgtacccctgtcgttggaagaaaggaacagtagcaatattcttgatttcataaataccttccccttcacgagtcactacacaaagagctttcaatccgttatcataaagaacgaacatatcgccgcgctccaaataccggtcaatcatactttcctgttcatcagccaagagtaataattcgagaaattcttttttatctgaagttactagctttatctccatattatctattttatcataaaataaaaatgttaccgactcatttgtctatggtccaaaatagtatccatattctccaaagcccatcccaccagtccttcaatatgaggaatcaaagtgccacccgtatctgtcagacaatactccacacggggaggtacttcagcatatactttccgttcaaccaatccatctgattccagagtacgcaatgttacagtcaacattctttgtgaaacatcttctatcgttttatgaatatcactaaaacgcatggtgccgtttgcgttcagcgtaataagcaccagcatcgaccacttgtctcccaagcggctaagcacatctcttatcggacaatttcctatcggatgaaagtttttcattctttaacgttttgtattttattgagttccaacaatagttatctctatgtaacttccttattttcaagtacgttattgcatttctcaaactagaaagatacatttgcatcacaaaagtaataaacttactaataataactattgtttcatttaaataattatgattatggcaaagaaagttgcagttttagcagtgaatccggtaaatggttgtggattattccaatatttggaagcgtttttcgagaatggcatttcatataaagtatttgccgtatcggatacgaaggagattaaaacaaattcaggaatcagcctgacagcagacgatgtgatcgctaatttgaagggacacgaagatgaattcgatgcactcgttttctcttgtggggatgcagtacctgtatttcagcagaatgccgataaaccctataacgtagatttgatgcaagtcattaaaactttcggagctaaagggaaaatgatgatcggacattgtgccggtgcaatgatgtttgactttaccggaattaccaaagggaagaaagtagcagttcacccattagctaaaccagctattcaaaacggaacagctaccgataagaaatcagagatagatggcaacttttttactgctcaagatgaaaacaccatttggacaatgatgccacaggttatcgaagcattaaaataatgtttgcaacgtagatataaaacaataaatataaacattattatattaatctacgcatccgaagatgaaaaagcacgttcctttaaaagcaacagtgtgtttctcggtgtacaacgggtcgtttcttttaaaggaacgacccgttggttttaaaggaaaaatgtacatttattgcgcattaataatcaatcacttacagattcaaaaaattcaaagaccgactaacttccccaatcattattcaattcaataaatccgcacaagtgttcactcctttatttctcaaatgattattgttagttaactaaaatccaagggaaatatcatatatcacattctcttttcgtaccaagaaaaagaaaaacggaacattacaaaaaatctgaaacagcgttcatcattttttaaaagtccgtatattagcagcttgaagacttgaaagagataaacagcatactccttccgagtttaaataaccaaacaagatgcctaaaacaatatgattagagaaagagagaattacaatgcatttttacttcattttttagaaagactgaatagctgtgactctattgagaaaaaaatcacagaatcacttacggatatttgcgaatactatggctttaaaagaggattcatttatcaaactgacggatttcgctacttctatctaaaggaaactgtcggaaataacgacaacgttttgcgacaacgttttgaaatcagcgaaatgaccaatcaacatgttgtccgtgcaaatggaaagaacaaacctttttatgcttgcagaaaccaaaatacttcttgggatgatgtagacatcgtggatttctataaagtcgattcattactaatccggcaaattcaagactccgaaggaaaaattatcggattcatcggatttggagacagagaacatgcaatatctttcaccgatgaagaactgcaaatgattcatctcattttaggctccctctccaaggaaatagcagtgcgggaatataaagaaagagaagtacgggcgagcaagacgttaagcagcatcatgaataatatgggagttgacatatatgtaaattctttcgattctcatgatatgttatatgccaatgaatcgatggctgctccttacggaggcatcgaacattttgaaggaaaaaaatgctggcaagctctttataaagataaaaccggagaatgtgagttctgtcctaaaaaacatttgattgacgaaaatggacaacctaccaaagtctactcctgggattatcaacgcccgtttgacaaatgttggttccgggtattcagtgcagcattcgcctggatagacggacagatggcacacgtgattaccagcgttgatattgaccaccaaaaaacaatagaagaagaactaaggatagccaaagaaaaagcggaaaacctggaccgcttaaaatcagccttcctcgccaatatgagtcatgaaatccgtactccgctcaatgcgattgtcggctttgccagtttactggtcgaatcggatgacaaaaaggaacgtcaggattatgtcgatatcatgcaagaaaacaccgaacttcttttacaactgatatccgacattctcgacttatcaaaaatagaagctggaacactcgacttcaccatggattatctggacattaagagcttctgtgaagatattatacgcaattatgatataaaagaagataagccggtaccagttttactagcccccaccctacccaatttttatatctatactgacaagaaacgcctgatgcaggttatcacaaactttatcaacaatgccctcaaatttacaaataagggacagattcttcttgaatatcatctgaaagaagatacctgtgaaattgaattttccgtagctgatacaggaatggggattgaaccggacaaagtagaccgggtattcgaccgctttgtgaaactcaattcattctcaaaaggcacaggcttagggctgtctatttgcaggagcattatcgaacatctcggcggcactattggagtggaatccgagatgggaaccggctcgcgtttttggtttactcatccctacaaaagcgtatccctataaaattgaataaaaagcccgttaatcagaaaaagacctgaagtctttttttcattcattttttatggtcagaatcaagtttaattcatttattattaatacttttgccaatgcataaacttaataagccaccagaaaattaaataaaaaatgacaactctttttcaaacccaaataattaactcatatataataaaattatttttgtctttctgtctattagctttttcctacatatcaccgattctagctcaaaaagattcagtgaactcgtcaaattatcttttaatcattaattcatatacagaagcagctccctggagcttcagaatgatttcagccattaccgaatatgcccagaattcgcctcaattagcactctataccgaacacatgaacatgctaatgatggacacagactccactttgaatgaattcagacaggcagttctggaaaaatacaagcgacattctccgcgtatgttgatattactcggaaactccagcatgatattacgggacgacttcagaaagatgtggggaaatattccgattatactatgtgctgaagaagattacatcggcccgaaggaattttatctccaaaagaagcctgttgagttgactgcaagaaccccgattgcagatatggcgcagccttacaatctcactttcctacattccaatttctatattaaagaaaatatagacctgatttgccgaatgactcccgatattaaaaatttcatatttatcggtgatgaacggcaaaacaaccagacttacaatatggttatcaaacaagaattgaaaaagagccatcccgacatcaattatcaattcatatcgccccggaagatgcaaaccaatcatttgctggacaccctttacaccgttgatcctaaaacaacaggaatacttttctcttcatggttttacaaacacacctttgccggcaacacctcgctagttacaaattcacacctgttagtctcaacgacttccgcacctctgttcagccttgggatgatgacaatcaaggacaacgcaggaggaataattggcggatacatctacgatcaacatgcatacagccagaaaatcatacaaacgatccaatcaatattgaatggcaaacaagcatccgagatacctttttacgagccttcagatgccgctccgactatcaactacaatgttttgctacgtaaaggaatgtcgccatacttatgtcccccgggcactattttctttaacaagccgcctacgttttgggaacagtacggatactttattttaggaaccatagtctgcttcatactgcttgccctattcttccaataccgcatcagtcatctgaataagctcaagaaaatacaacagaaagagattgacacaatgacttcttacaaaaacctgattaacaatatgcctgtattgtatatgcaagaagagttaatcatgaatgaagaaggcactccgatagaacttgtataccggaatgtcaacgctcatttcgagaaaagtttcttccgtaaagaagatgtagtaggcaagaaagccagtgaaatattccctgaatccatgccggagttcctgcatttcaccaaaatgtcacttgcggaaaacaaggctatcactttcccctattatttcaaacagatagacaccttctatgatgtagtactaaaaggaactcaccacaacaatattgtcgatattttctgcctggacagcaccgaactacacaaagcacaacaaaaactaagtgctaccaacaataaactggcaatggcactggacgtagccaatatcgtgccttggaaatgggatttgcgaagcaaaaccatactttgcgacatcaataggcctattgagcttagcacaaacgataaagacgtgaatgaagaacaattggcagtgcccgattcccaatatttctcaaagatattcaaagaagaccgtaaacgggtagaaaaagcctatgatgacctgatagaagggcgatcggataaagtcagggaagaatatcgggttatcaatgtacagaataacattcacagaatcgaatgggtggaagctcaagccgctgtagagacccgtgacgaaaacggcaagccgctcaccctggtcggttcttcacaagtcatcaccacacggaaaaagatggaaatggaattgaccacagccagagaccgggcagaagaatccaatcgtctgaagtctgccttcctcgccaatatgagccatgaaatccgtactcccctcaacgctattgtcggtttctccggcatattggcttcaacagacgaggaagaggaaaagcaggaatatgtgagcatcattgaaaacaataataccttgttattacaattaatcagcgacattcttgatttatcaaagattgaagccggaacattggaatttcaatattccaacatagacttgaacaaaatgctgaacgagttaacgagctcattacaattaaaaataaaatctgaaaaagtacagctaacctgccatctggcagagaaaaattgctttatccatacagagaagaacaggctgtcacaattgctcatcaacctgataagtaatgccatcaaattcaccactgaaggatacattcgttttggctatgaactccgcggcaaagagatctatttttatgtcagcgatactggctgtggcattcccaaagacaagcaaaagagcattttcggacgcttcgtcaaattaaatagtttcgaacaaggcactggcctgggactttctatctgccagactctggtagaacacatgggaggtaccatcggagtagactcggaagagggcaaaggctcaacattctggttcacgctgccatataaagccgcaatagccgtagaagaaagcataaaaaaagaggaaattcagccgataagtatagaaaaaaacaagtttaccattctgattgccgaggataatgaaagtaactacaaactgttcgcatccatactaaagggagagtatcaattaattcatgcctgggatggacaagaggcggtggaaatgttcaagcaatataatccgcagattatattgatggacatcaatatgccggtcatggacggttacgaggcaactaaagaaatacgcaaatattctgccaaggtacctattatcgccattacggcttttgcctatgcttcggatgaacaacgggtgatggaaagcggttttgacggctatatgcctaaacctatcaatgcccgcctgttgaaagcacaactgacggaaatcatgcagaagcgtattattttactttaagagacagagaaccaaaagcaaaaaacgaatatctacatattccatttatgactgaagaaaaaatacataaaaaccgcaccggaagttggtgggcattaagtccgttgctcgtattcttatgcctttacctggtaacttccattcttgtcaacgacttttataaagtgcctatcacggtggctttccttgtttcttcctgctacgccattgctattaccaaaggattgaaactagaccaacgcatctatcagttctccgtgggagctgccaataaaaatatcctcctgatgatatggatattcattcttgccggagcctttgctcatagtgcgaaacaaatgggagcaatcgatgccactgtcaatctgacactgcatattctgccggataacctgttactggcaggcatcttcattgccgcctgtttcatctctttatccatcggaaccagcgtaggaactatcgtcgcccttactcccgttgccgtaggactggcagaaaagacagaaatagctctcccctttatggtagccgtcgtagtaggcggttcttttttcggagacaacttatcttttatctccgacaccaccatcgcttcgacaaaaacccaggaatgtgtaatgcgcgataaattccgtgtaaattctatgattgtcgtcccggcagccatcattgtgttgggaatttacatatttcagggactattcattaccgctcccgcccaaacacagaccattgaatggatcaaagttataccttatataatagtattaggaacagccattgccggaatgaacgtgatgctcgtactcataataggtatattgacaagtggcatcattggcatcgcgaccggcagctttggaattttcgactggtttggtgccatgggaatgggaattacaggaatgggagaactgattattatcactctattggccggagggatgctcgaaaccatccgttataacggtggtatcgatttcattatccggaaactcacccgccacgtcaatggtaaaagaggagccgaactaagcattgccgccctggtaagtatcgccaacttatgtacagccaacaacacgattgccattataacaacaggaccgattgccaaagatattgccgtgaaattccatctcgaccgaagaaaaacagccagtatcctcgatactttctcctgcctgatacaagggattattccatacggagcgcagatgctgattgcagcgggacttgccagtatctcccccatcagtatcatcggaaatctctactatccgtttacaatgggagcatgcgccctgctagcaattttgttccgctatccgaaacggtattcgtaaaaaagatgcgaaatgtttgtcaatcaaaagaaaagccgtatctttgtgcccgctattacgagataatagtataattcaaatcaatcattaaaaacaattatttaaaatggcaactagaatcagattgcagagacacggacgtaaaagttacgcgttctattcaattgtaattgcagacagcagagcaccacgtgatggtaaatttattgagaagattggtacttacaaccctaacaccaatcctgctacagtagatttgaatttcgacgctgcattggcatgggtactgaaaggtgcacaaccaagtgacactgtacgtaacattctttctcgtgaaggagtttacatgaagaaacatcttctgggcggtgtagcaaaaggcgcattcggagaagcagaagcagaagctaaatttgaagcttggaaaaacaacaaacagtcaggtttggctactttgaaagctaaacaagacgaagctaagaaagctgaagctaaagcacgtctggaagcagaaaagaaaatcaacgaagtgaaagcaaaagcactcgctgaaaagaaagctgctgaagctgctgaaaaagctgctgctgaagcacctgcagaagaagctgccgcagctccggctgaagaagctcctgcaacagaagctgctgctgaataaatttcagcagattccgaacaagaaatcaggaaaagctataaatcctctccggtccgccggaggggatttttttattgttttctgctataaaacatatcaaattatttattccgttcagaataaaatgcctttctttgcatcagcatagttcagcatagtgttatttatttttcgaatatgaaacgaattgataaaaaggcaacattcggacaacaggcaagcaaggttacgcaactagcggacgcacttagccaggcgatttccagaaaagaatttcttgaaggagattctttgccttccatcaatcagttgagtgctcaatacggagtatcacgcgacaccgttttcaaggctttccttgatttacgcgaacgaggcttgatcgactccactcccggcaagggttattatgtgacgagccaggtgaccaatgtcttattgctgctcgaccaatatactcctttcaaagaagccttatataacagtttcgtcagacatctgcctatcaactataaggtagacttattatttcatcaatacaacgaacggttgttcaatacgatcctccgggaatccatcgggaaatacaacaaatacatcgtgatgaatttcgataacgaaaaattcagcactgttctcaataaaattaatccttcaagattactactccttgatttcggcaaattcgaaaaagaaaagtattcatatatctgccaggattttgatgaatttttctatcaggcattgaatctgctcaaggaaagattgaagaactatcaccagctcgtttttttgtttcccaaaagcctgaaacatccccaaagcagtaaggtgtattttacccgtttctgtcaggagcaaggattcctctgtgaaatacaggaggatattgagaatctgatcgtacgtaagggagttgcctatatcgccatcaagcaacaagatgtagtaaaagtggtgaaacaaggaagattggaagggctgaaatgcggaaaagatttcggtctgttagcgtataatgatattccttcctacgaagtgattgacgaaggaataacctcattgagtattgattgggaaatgatgggaaacgaagcggccaatttcgttcttaataatgtaccggttcagaagttcttaccaacggaagtaaggcttcgaaagtcactttaattttttttttgcgaagacatcagcacagttcagcacagatattaattaatcctttaatagatagaaaccatgaaaaagtatccgaaaatcgggattcgtcccacaatcgatggtcgccagggtggcgttcgcgaaagccttgaagagaaaacaatgaatttagcaaaagcagtagccgagttaatcagcagcaacctgaaaaacggtgatggcagtccggtagaatgtgttatagccgatagcacgatcggacgcgtagccgaaagtgccgcttgtgcggaaaagtttgaaagagaaggggtcggctctaccattaccgtcacttcttgctggtgctatggtgctgaaacgatggatatgaacccgcattatccgaaagctgtctggggattcaacggcacagaacgtccgggagctgtataccttgctgccgtacttgccggacacgcacaaaaaggccttcccgcattcggtatctacggacgcgacgttcaagatctggacgataatacaatccctgaagatgtatcggaaaagattcttcgttttgcacgcgctgcacaggcagtagctacgatgagaggcaaatcttacctgtcaatgggtagtgtatctatgggtatcgccggttctatcgttaatcctgatttcttccaagagtatttgggaatgcgtaatgagtcaatagacctcacagaaatcatccgtcgaatggacgaaggcatctatgaccacgaagaatacgccaaagccatggcctggactgaaaaaaattgcaagacaaacgaaggtgaagacttcaagaaccgtcctgaaaaacgtaaaacccgtgaacagaaagatgctgattgggaattcattgtaaagatgacgattatcatgcgcgacttgatgaccggaaatcccaaattgaaagaaatgggattcaaggaagaggctttgggacacaatgccattgcagccggtttccagggacaacgccaatggacagacttctatcctaacggtgactatccggaagctttactcaatacctcttttgactggaatggtatccgtgaagcatttgtggtagctaccgaaaatgatgcctgcaacggtgtagccatgttgttcggacatctattgaccaaccgtgcacaaatattctccgacgtacgtacttactggagtcctgaagccgtgaaacgtgtaaccggcaaagagttgagcggattggcagcaaacggtatcatccatcttatcaattccggtgcaacgactctcgacggttccggccaatcattagacgcagcaggcaatccggttatgaaagaaccatggaacctgacggacgctgatgtagagaactgtctcaaagcaacgacctggtatccggcagaccgtgactacttccgtgggggtggcttctcgtccaacttcctgtcaaaaggcggaatgcctgttaccatgatgcgcctcaacctgattaaaggcttaggccctgtcctgcaaatcgcagaaggttggacagtggaaattgatccggaaatccatcagaaactcaatatgcgtacagacccgacatggcctaccacctggtttgtgccccgtttgtgtgataaaccggctttcaaagacgtatattcagtcatgaataactggggagccaatcatggcgccatcagctatggacacatcggccaggacttaatcactcttgcttccatgctccgcatcccggtatgcatgcacaatgtagaagaagatcagatgttccgcccggctgcctggaatgctttcggcatggacaaagaaggatcagattacagagcttgtgcaacttatggtcctatttataaataaacaagtttttttcgtcctgtataaataaatattttaactttgccgttcgtagggacggggtcctccacccgacacataacaaatgtcgggatagccccgccccctacagcgacttaaataagtaagactatgattactaacgaacatattgaacagttcattgcacaagcacatcgttacggggatgcaaagttaatgctttgcagcagcggtaacctttcctggagaatcggcgaagaagcattgatttccggtacgggttcctgggttcccacacttggcaaagaaaaggtttcaatctgccatattgccagcggcattcctgccaatggtgtaaaaccttctatggaaagtacattccatttgggtattctccgtgaacgtctggacgtcaatgtcgttctccatttccaatcggaatatgccaccgctgtctcctgcatgaagaacaagccggcaaatttcaacgtaacagcagaaattccttgccatgtaggttcagaaatacctgtgattccgtattatcgtcccggctcaccggaactggcgaaagccgtggtagaagccatgcaaaagcataactcggttttactgaccaaccacggacaagtggtgtgcggaaaagacttcgaccaagtatatgaacgggctacttttttcgaaatggcttgtcgcatcattgttcaatccggcggtgattattcagtgctcacaccggcagaaattgaagacctggaaatctacgtattaggaaagaaaaccaactaatatccaggcatattaccatgaaagataccatcaaacatacttatttagcagcagacttcggaggcggcagcgggcgaatcatcgccggctttcttcttaacggcaggctggaattggaagagatataccgcttctccaaccggcaggtcaaactaggcaatcatatttactgggacttcccggctctgttcgaagatatgaaaaccggactaaaactggctgcacaaaaaggatatgccgtaaaaggtattggtattgacacttggggagtggatttcggactgattgacaaacatggaaacctattaggaaatccagtctgttaccgggatgcaagaacagagggaatgccggcagaagtattcaagtgcatggatgaacatcgacattatgccgaaaccggtattcaggtgatgcctatcaatacgctgtttcaactttacagcatgaagcaaaatcaagatgcacagttggaagttgcccggcaacttttattcatgcccgatctcttcagttatttcctgacaggggtagccaataatgaatattgtatcgcctccacctctgaattactcaacgccaaatcacgcaactggtcattcgataccatacatagcttaggtcttcccgaacatctgttcggtaaaatcattcttcccggaacaatcagaggcactctgaaagaggatattgcacgcgaaaccggactgggtgccgtagacgttattgccgtaggttcacatgatacagccagtgccgtagctgctgttcctgctgcagaaagtcctatcgctttccttagttccggcacttggtcgttactgggagttgaagtggacgaacccatattaacggaagaagcaagaaaagctcaattcaccaatgaaggaggtgtagacggcaaaatccgtttcctccagaatataacaggattatggattctgcaacgcttgatgagcgagtggaaagcgtgtggcgaggaacaagattatgatataatcatcccgcaagcagccgaagccgagattgatacaatcatccctgtagacgacaccatattcatgaatccggaaaatatggagaacgcgcttattcattattgccggaatcatgctttgcaaattccccaaaacaaggcagagactgtacgatgtgtgctccagtcattagctttcagatatcggctggctgtggaacagctcaaccgttgcctccccgctccaatccgtcagttaaatatcatcggaggaggatcacaaaataagttgctcaaccaactgacagctgacgaactcggtattcctgtttatgcaggtccggtggaagccactgcaatgggaaacatcctgacgcaggcaatggctaaaggagaaattgccgatcttcgtgaattgcgggaaattgtcactcgcagcgttacaccacaagtatattatcctaaaaaataaaagtatatggaaacatctaaaaccggttatcaggttcaatcttatgacgttcccgtcaaacgatattgccaaacccttgatttacgcgattctccggaactaatcgccgaatatcggaaaagacatagccaggcggaagcatggccggaaattcttgccggtatccgggaagttggcatcctggaaatggaaatttatatcctgggaacccgactgtttatgatcgtcgaaactccccttgattttgactgggacacggcaatggaacgcctgaacacccttccccgccaacaggagtgggaagaatatatggctatcttccaacaagccgcacccggaatgagttccgccgagaaatggaaaccgatggaaagaatgttccatttgtataatacttaaaaaaataccagaaacaaccatgaaacacaccaagcagtccatcatttcgaaagatggcatcagttatcttataccttttattctcattaccttctgttttgcgttatggggatttgccaatgacattaccaatccgatggtaaaggcattctctaaaatcttccggatgagtgccaccgacggggcattggtacaggttgccttctatggaggctactttgcaatggctttcccggctgccatcttcatccgcaaatattcctacaaagcaggtgttttgttaggactgggtatgtatgctttcggagccttcttattcttccccgccaaaatgacgggtgagtactatccgtttctgattgcttattttattctgacctgcggattatctttcctcgaaacaagctgtaatccgtatattctttccatgggaacggaagaaacagctacccggcgattgaaccttgcacagtctttcaacccgatggggtcacttctcggaatgtatgtagccatgcagttcattcaagcgaaattgcatccgatgtgtaccgaagaccgcgcattgcttaacgacagcgaatttcaagcaatcaaagaaagcgaccttagcgtcctgattgctccttatctcattatcggactgattatcgtagccatgttgcttctgatacgattcgtcaagatgcctaagaatggagatcagaatcatagaatagacttcttccctacactgaaacgtattttcacccaaacgcgttatcgtgaaggtgtgattgcccaatttttctatgtaggtgcacaaattatgtgctggactttcatcattcagtatggaacacgcttgttcatgtcacaaggtatggacgagaaaagtgcggaagtactatctcaacaatataatatcatagcaatggtgatattctgtattagccgttttatctgtacgttcattctgcgctatctcaatgcgggtaaattgctgatgattcttgctatctttggaggtattttcactttaggtgtaatcttccttcaaaatatcttcggaatgtattgtctggtagcagtatcggcttgtatgtcattgatgttccctaccatctacggtattgccttgaaaggtatgggagatgatgcgaagttcggagctgccggccttattatggctatcctgggaggttctgttcttccaccgctacaggcaagcatcattgatttggaacaaatagcgtggttaccggctgtcaatgtttcatttattcttccgttcatctgttttcttgtaattatcggctacggttaccgcacagtgaaaagaaactggtaaaatacatatctaaaaatagtgacggtatcacattggtataccgtcaccatctcactcgaatagtgacgccatccctactggatagcgtcactatttttttccttttcacagttaagagttcataaaaacacagaacttgaagtcgtttttttagtttcctttttcgcatactaatcttggcttcttagtattgttgaattatttacatacatttgtctcataccaacagacctgataaacctatgagccaaaaccaagaccctattcatctagcccgccaattcgaaattatatttaccacgcactattccgctgttaaatatttcgctataaacttgctcaaatctgaagaggacgcagaagatatcattcaggatgtgttcgctaaattatggacacaaccggaggtctggctggaaaacaaagacataggccagtatatctacgccatgactaaaaacacaactttcaatttcatcaaacgcaaaagactggaacaatcctatcaggaacaattatcgcagaaatatctaatcgaagacttactaaaatccgaagatactctcgaccctatctattataaagaagcactattaatcatccgcctaattctcgaccgccttcccgaacgccgcagaaaagtttttgaaatgagccgcatcaacaatatgagtaatatggagatagcacaagcactcaatatttccgtacgaactgtggaacaccaaatctatctgaccctgctcgaaataaaaaaaactatttttattgcatttttcttgtgtttcttttaagtaatcccccattttcgattgtgctaatagtgtaaccactaaaaagaacagcgcaaatgaggaacttttttcagaaaatactgatattatttaccggcaataactatccggaagctacccaaaatgaattctatcaatggctggtagatgaggatcatgcatcccagaaagaagatgctttgagagagctatggaacaaagcgcaacggcaaaaaaacgtgaaaggaatgcagaagtcttacgagcgcctgaaaaaacaggaaggtattccaaccgtacccaaagagagaagaattcgcccaatacatatatggcaatccgcagccgctatcttattcctcctgcttgcctcttcggtctatctatcgactgtaggcacaaaagcggaaaccgacttgttacagcaatatattccgatagcaaaaatgagaagtttgacgctgcccgacggaacaaaagtgcaactcaactcgaaaagtacacttttatatccgcacgagtttaccggagatagtcgtagtgtattcctgttaggcgaagccaacttcaaggttaagccggacaagaaacgtccgtttatcgtgaaatccaatgatttacagattactgcgttgggtacggaatttaatgtatctgcctaccctgaaagccaggaaatagcaacgaccctcatttcaggcagtatccgtgtagattataacaatctgacaacaagtgtcattctccatcccaacgaacagtttgcctataacagaaacaataagaaatatgatctctccaatccggatatggacgatgtgacagcctggcaacgcggagaactggttctgcaaaagatgacgctgacggacatcatcaacgtattggagcgaaaatatccttatgcctttgtatatagtatcaagaacctcaaaaacgacaggttcagttttcgtttcaaggacaacgcaccactcgaagaagtgatggaaatcatcgtgaacgtggtcggacaaatggactatagaatagtagaagacaagtgctatctgacaagaatataactttttaaccttatatgccatgcaaaaaaatacccggaacagaggcctcactccgtcccggatatgaaatctgaattcccaatattagagtttactctacaaattacctcgaaataatttagtcaataacctaatactaagaaaatgctacaaatttataaatttatagtagacaagaagacaaagggaagaagttttatgctttttttctgtttgatgctcgccacaacagtttcccttgcacaaaatggtgctaaaatcactattaaaaagaatagtatatctgtgattgaagcactgaaagaagttgaaaaacaatccggtatgtccgtaggctacaacgattcccaactgaaaaacaaaccggccatcaccctcaatatagaggcggcttcgttggaaaatgcgctcgctcaaattctcaaaggtacaggtttcacctatcaactgaaagagaaatatatcatgattattccggaacaaaagaaagaaagcaacccgaccaaaaagatcaccggtaaggtagttgatgaaaacaacgatcccttgatcggagtgaacatcaaagtggaaggcactgccgccggatctatcacagacatcgatgggaacttcctgatcgaagcttccaccggaaatacactgacatttacttatatcggttatacttcagaaagcattaaagtcaccaaccagaataattaccgcattcaactgacagccgatacgcaacagctatcggaagttgtagtaactgctctcggcatcaaacgcgagcaaaaagcattgagctacaatgtccagcaaatcggagcagacaagatgccggaaataaaagacgccaactttatcaacagtttgagcggaaaggctgccggcgttgtcattaatgcttcttcttccggtgtgggaggtgccagtaaagtggtgatgcgtggtacaaagtctatcgagcagagcagtaatgcgctatacgtcattgacggtattccgatgtataacttcggcggtggaggcggtactgaatttgactccaaaggtgctacggaagccattgcggatattaatcccgacgatattgaaagcatctctttcctgacaggtgcggcagcagccgcaatgtatggcagcaacgctgccaacggcgctattgtagtgactaccaagcggggacagataggaaaactgtcggctactttctcaagcagcatggaatttatgaacccatttgtattgcccaagtttcagaatcggtatggaaccggtacacggggcgatgcggaaggttctcccatattaagttgggggcctaaactgaatccggccaaccaaacaggatatgaacccaccgacttctttgatacgggagcggcttacagcaactccatcaccctctcgacaggtacggacaagaaccaaacgttcttttctgccgcagcagtcaattcagaaggaatgattccgaacaataggtacaaccgatataatttcacatttcgcaatacgactcatttcctgaatgacaagatgaaattggatgtaggagccagttatatcatacaaaatgaccgcaacatgaccaatcagggagtttattccaatccattggtttcggcttacctgtttccacgcggcgatgacttttctctagtaaaagccttcgaacgttatgacgaagcacgtaaaatcaatgtggcttactggccgcaaggtgaaggggatttgcgtatgcagaatccttactggattgcttaccggaacgtccgcacgaatgagaaaaagcgttatatgctgaacgccggactgacatacgacattttggactggctgaatgtatcggcacgtatccgcgtggataacaccgacaatacttatcagcaaaagctatacgcaagtacgatctctacactgaccgaaggtagtacccagggacattacaccatccaaaaggtgaacgagacacagacgtatgccgacttcatggtgaatatcaataaacgcattgacgacttcacggtagtagtcaatgccggtacttcattgagcgacaactccagtgatttactgggttacggtggtccgattcgcgacacgggagtgcccaacgtattcaatgtatttgatttggataatgccaagaaacgggcaacacaggagggttgggaagaaatgacgcagtctatttttgccagtgcggaaataggatggaaaagcatgctgtacctgacgttgaccggacgtaacgactgggcttcccagttgaaaggctcgaatcctacttctttcttctatccatcggtaggtctttcggcagtaatcagcgaaatggtgacattacccaaagcgattgattacctgaaagtacgcggatcgttcagttctgtgggtaccccctacccgcgttttctggtacaaccgacttacagctatgaccctaccaaacaggactggaacgccaaaacccattatcctatcggcaaactgaaaccggaacgtaccgactcttgggaaataggtgtggacggaactttcttcaaggatttcaaagtcagtggttcattctactatgccaatacctataaccagacattcgacccgaaaatcaccgtatcttccggctattcgactctttatgtgcaaaccggttatgtacgcaatctcggtgtcgaggggctactctcttacggacatacatggcgcgacttcggatggaacagtaatttcactttctcctggaataaaaacaaaattgtggagttggttaaggactatgtgcatcccgaaaccggagaaatcgtcaacaaagaccgccttgaactaaaaggactgggatataccaaatttatcctgaaagaaggaggcacactgggagacctgtacacgaatgccgacttcatacgtgacgataaaggatatatccagatagacaaaaatggggatgtcgccaaaacggataatctacctgacatcaaattaggcagcgtatttcctaaagcaaacctggcatggaacaacagcttttcttacaaaggtatttatgcgggatttcaattaagtgcccgcctgggaggtattgtttattcagccacacaggctgctctcgaccaatatggcgtatccgaagcatctgctgccgcccgtgaccgtggcggagtactcgtcaacggacgtagctgggtgaacgcacagcagtattacgagattgtagctacctcaagcgggctgccgcaatattatacgtatagtgccacaaatctgcgtttgcaggaagcgcacatcggatacaccatcccccgcaaatggttgggtaatatctgcgacatcaacgtctctgtagtgggacgtaacctgtggatgatttattgcaaagcacctttcgacccggaagcgattgccacaacaagcaatttctatcagggaatcgactacttcatgatgcccagtacacgcaattttggttttaatgtaaagattaacttctaaaactatgaatactcaaatgaaagaatacagaaaagcaaccctccgactggcatacctgctaacgctgatgctatggacgggaagttgtatcgatatggatatcaatcgtaatccttacgagacaacgcaggatgaactgatgcgcgaaaaccatatcatcggctcgtctctaaagagcatggaagcattggtggtccccacacaagagcatctttatcaatttgtggaagcgatgtgcggaggagcctacgggcgttattttggagagactcgtgtgggttggactgaaaaatactcgacttataatcccaagtcggactggctgaaggcttcgttctccgatcctatctcggaaatgtatccttcctaccgggatattatcaaccgtaccaatgaccccgtcgcactggcattcgccaagattctgcgagtcgctatcatgcaccggtctacggatatgttcggaccgattccctataccaaagtattgggagataaaacggaaggtgacggccttagtgctccttatgactctcaagaggaggtttatgtggctatgttcaaggaattggaagaagcagatgaagctctgaaggagaatctaggtctaagtgcggaaggatttaagaaactggataatctttattatggagatgtgcggaaatggtataaataccttcactcgttacagcttcgcatggccatgcgtatcgtttatgtgaaaccggaactggccagggaaatagccgagaaagccgtagccgcaggtgtgatagagaacaatgaggacaacgcgcaactgcatgtggaggagaatcgttcggctctctgtttcaatgattggaaggattaccggatagctgcggaaatcgtttcctatatgcagggatataacgatccgcgtttggaaaaatacttcacccagggaaagtatcaggatgataccgattactatgggctacgcattggtattcttccttccaaagtgacggacgacgagttgatacaaacctattccaaccgtttgatgactgccaatgatacgtatatgtggatgactgccgccgaggtaacgttccttcgcgccgaaggtgccctgcggggatgggcaatgagcggagatgcccaacagctatatgagaaggcgatcaccctttcctttgagcaatggggcgcaagcggagcaagcggatactcccagaataaagcattggtgccgggggcttacaaagacccgagaggtacatacagcgcccaatctccgagcagcatcaccattgcctggaacgaggacaaggagaatacccgtttcgaagaaaacctggaacgtatcattactcaaaaatggattgccatgtttcctctgggcattgaagcctggtgcgaacatcgccgcacagggtatcctaaattccttccgataatggacaacaagggagtgggaatcactaacctgacactgggaatacgacgtctctcctatcctgccgaagaatatcagctgaatgcggaaaatatgctcggtgccctgcgaaagctcaatggagaagataacggcgctacccgcttatggtgggactgcaatccgaatgtaaaataatgtggaacttaaacccaagatacaatgaaacagaattcattcataagtgtcatattgaccatagcctgctcactgatgttcgttgcctgtagcgactggacagaaccgacaccggttgattacaaccctatatttcccgacgaacaagaccccagcttgcatgaaaaatacgagcaaagtctgaaagaatacaaaaaccggaagcatacgttaatgttaatacgttttgccaacaatccgggtacgacattgggcgaacaggatttcttgcgttccttgcccgatagcgtagattttgtggtgctgaccaacgctgataatctgtccgtttatgataaggaagacatatccaaactcaaacggaccggcaccaaatttctctattacaagaatttatccgaattctacgaccaatgcgaagagacagaaaacctggaagaattcaaaacgaaaatgaatgcggcattgaaaaacggggagagtgatgaatttgacggttattatgtgcagtttggtcgtgccggaagtatgatgcatgtcgatttcttcaatgaggtaacgacggctatccgggaaaaacttgccgctatcggcggtccgaaagctaataatggaaagttggttttctttgatggcatcgtcacatttacagtggattatagcggaagatacgaagagccgttcatcgatttggtagactatttcgtggatgggcaaattgtgttgcttgaaagctcactcgaaataaaactgaatatgagccaacctgtaggtttctatgggaaaatgcccaaagagaaagtgataacgacagccactcctccgaccgatgacggtaaaaccggtatcatcagccgggaagatttggatgttatacaaacctcggaagggatggcctacatcatcaatcatttcatcacaggactgggtaacaatggtccgctggcaggagtttctatctacaatgccaatgaagattatctcgccaccgatggggtgactaactaccgccgtatacgtgatgctatccaaaaactgaacccatcaccgattaattaatgaaaggaggaactatgaaacgatataaaataatcatctctctggctgcaatcatctgcggactgatgattgcctgtgacaatacggattacagcaataaagcaccattcgacaacatggtctatatcaaggaagccagtaacagcaattcagaaagagtgactttccgaaatacgctgaatgaacagaaacgtgccttcagcgccaagttgacttacccggcaggaaaagacatcgtagtgaagctgaaagcggatcccggactgataaacgaattcaatgcccggcacgggactgattatggaatgctgggtagtaaatattatagcctgtcgaacagcgaactgattatcaaagccgaaaagagtgaatcattgattgatacgatctattttaataacctgttagatctggagattgataaaacttatctggttccgctcaccatctctgaaacgtcgggtggcgttcatctattgaacggttcgaaaacattgttctatctggtgcgccgttcaagcgctatcacggtagccgccaacctgaaagacaattatctggaagtgcctactttcctcgacgaagagaaaaatgcctgtctgaaagaattaggtcagattaccatggaagcactggtatatgtagaggactttacatacagcggaccaagcaatacggccggtgcatcggatatcagtacgatcatgggagtagaacagcatttcttaatgcgtataggtgatacaagtttcccacgccaacagttgcagatgcagggaccggacggagtcaaattccccgccgccgacagggctaagtcactgaatgcaatgacatggtatcatatagcgctggtgtacaacgccaaggaacattttattgcctattatgtgaacggacaactgcaaagtcaggatatctcttatggaaaaggagctactgtggatatctgtggaacgccggattgcgaattccagataggacgctcttatgaagatgagctacggcaactcaacggtaacatcgcagagatacgtatctggaacacttgccgtacgaaagaggaaatctggacgaatatgtataaagtggaagatcctgaaaacgaagaaagcctgcttgcttactggaaatttaatgaaggtgagggaaacattgtcaaggaccattcgaaacacggattcgatgcagtatctgccgaacctcttgtgtggccgacgggaatcgaaattccacaaatcaacaagtaatcattcactttaaagataaccatggacatgaaaagaaatataaacttcaaaaatgttctctgcatggctgccattacattagtaaccggcatgctaggaggctgcgaagataattccattgccactcccgtaggtaaattacctaacgagacggctttagacaataactttggcatgctaaaatgtgatatgacaaccagtgacctggaaatcaccatgaccaataccaagactcccgattttgcattcttctaccaaacggtgaagccggtggcacaggacacccgaatcacaatgaaaatcgacctcgacttagtagacaaatacaatgaagaacacggtacggaataccggaaaatgtctactatcagcattgagggcatcagtaacgatggtgcaatgactattaaggcaggagatacaatgtcggatactatcatggtacgcctgaatccgctaggcacattgcatgattattctttgctccctattaccgtagaactaccggaagaaagcggaattcgtccgtcacgggatagtaatgaaatctattacaagatttattataaacgctctacttatccgtggttgagcccgatgaaggctgatatgaaaaagtacaagatggtagggtttattgatggcgaaaaagtcaacgcctccattgccaaagaatttatcatggtattatatgataatgaaacattcggtcccggacattatgagttatgggaaacgtcgtggtatgcctatttatatgacatcattaatgtgaatgccgcaacactgggatatgcgaatggaaaagtgactctgaaccaatcagccaatttcaaaaagcagttaagcaatatgtcgtcactctccagctatggtataaagcgttgcgtcacccttaaagcagaagggaccggcttgggattctgcaacctgacagatgagcagattacagcctttgtagcggaagtcaagaagctcgccaactaccgtgtagatggcattaatctcatggacgaaggtgccgaatatggtataaacggacatccggctgccaatgcgacctcgtatccgaagctcatcaaagcactacgggaatctttaggcaagaccaaactgattacagttaccataacgggtgatccggccggttcactagcctccgaggctgcgggtatcagagcaggtgaatatattgattatgcctggacatgggtaaataccaaaattatgaatccatgggaggatagctcgattgaaaaaccaatagcaggactggacaaatctcaatatggcggtttcagcaccgacgaatatacgttcgattatgaaaatgacgaatcgtatccggaaacgttacgagaaaagttatatgacaaaggtcttggcaaactttacataatgcgtaatatccctttctggtcggacgcactggaagcaacaccatatcatgctaacataaatgcaggggcagcagccttttatagagtggaaggaggccataaatatgaaccggacatcaactatttgcataatggtaaatacaaggatatgaaaggggataaaaactattacgagatgtagaattatcaattaaacaggggaggaaaaacaaatcctttccttactaacaggagcttatgcgcctattatcagtaaaataatataaccggaattttaaccatctatttggttaaagttccggtttcactatttccaccaaatatcatcaattaaaataatacaaaaacacaacacttatcacctacaaaacaacaccaaacaataacaatacaccatttgccaataactcatcatttatttattataccaaatcattacttttactccgcaaaaacaaactatatttcaataaagaaaatatgtttactttaccttaggaattacatatgaaaaagcatattgtgatactgatagccccaaaagattacagtatcaaatacaagatacgcccaccaccgtcaaagaatctctatttagtattatatattcagaaaaaatgatctattaattattgtcacttggaggaaatagatattccttaaagaatgattcaagacgtaaggatttaaatctgcatacggaactcgctttcttaatattgaccttcaaagaacaaataattttgagattagactgtttgagtttagtaatgccctaaatcacactcgttgtgcattttctcatcccccctcaactaaaaaggaacagaggtatacagtccaagtgacttcaacaaaaaataaatatgaaatacttaatgataacgtcactatttgtctctattatagatgcaaatatctttcaccagtctcacttcttcttactacttacagccggaggaatttcattatattggctcttatctcattttcttaccctccataaggaaatcaaaatcttaaaagaagagcaccaatatttcatggattcttttcaaagcattcgcaaccctatcacactcgttcatacccctctaagagctgcttgtgatgatagttgccccgaagacataaagaaaatgttatcactagtcattcgtaatatagactgtcttgatgaacacctaaccaaattaatgaatctgcgacatctgcttatctactccaaacagatggatattgccgaatatgaactgggaaacttcattaataacagagtccattcattgaaaaatttcgctacggacaagcggattaagttagaaataaaaacagagtttaattatgccagcgtttggttcgatcaaagtaaaatctctcccatcattgataaattcataaaaaacgcaatagaacattcgaaacctgaagataaaaggattatcttttcaatttcttctaattccgaacactgggaacttaaaacgttcgatgccaacaagggcaaattgctaacatgttataggcgccaaaagtatcacttgattaaacctaaacataaatcagagttcaaatatgcatttgccaaaagtgtactctgcaaaaaattaatgaaactatgtgatgggaatattcttatcaatcattcaacccacactgtctcactaagatttcctacaacaaattcagaaagaaaggtatccggatataatatcatacactccgcaaaaaagtcggaagaaagaaagactgatacttcattgggtaagattgctcataaaaaaagttcaatcaagcctactgttgttctcgctgacagtaatgaagaattcaagtcttatttggaagaatgtttatcaaaggattttgatgtgaaaagtttcgggaatggctctgaagctttagaatgtataaaagagaaatatcctgatttagtgatttgcgaccttatgctgcatggaatgtatggctatgaactgtcatcaagactaaagacatcaggagaaacatccgttattcctatcatcctttacggttcacgtatagatataggacaacgcaacaaaagagaaagttctctggccgacatctttttatatgtgcctttccacatcgaagatttaaagatagaaatgaatgtacttatcaaaaacaaccgttctctaagaagatcattcttgcagacagttttcggaaagcagttcttggaaaaggaagaagagaaagttttagatgatagtaattacacattcatcaatcaagtaaaagaatttattctaaaaaatatagataaggaaaatctgacgatagatgaaattgcctctgaactgtatatgagcagaactgctttctttaataaatggaaagcactgacgggagaagcaccgaagtattttatttatcgtattcgtatggaaaaagcacgtgagttattggagagtggaaaatactctgtccaggttattcctgaaatgattggattgaaaaatcttaagaatttccgccataaatacaaagagtatttcgggataactccaagcaagtccattacgaaaaagctataaaataaaaagaatattttataattgaagatcccatgaacagggatcttcatggcaatactcatataaaaaaatattctatttttatttccttatgcagtatttcacaagtaccggcatttactttatgtacgtacaccttaattttgaaattaataatctaatttaaaacagtatgaaaattataactgaaataaaaaaagcttgttgttttaatcgttttgctttcttagtaatgtcattaggcctgatagccacttttacagcatgtagtagtgataacgattctgatattcccgtatattcacttaaagatgtggaaggtaattattccggtaatatgctgacagaaactgctccatccgtcaatccacaaaactattccttcaaagaagaacagccgcaaggagccacagttaccgctgaagtaaaagacaatcagattatgataaaaaaacttccggttgacgatctgattaaaagtattgtcggtgaagaaataggcgaaattatcattgagactttgggtgatatcaattacaacattccttatactgcagcctttaatgatgatagcaaaggctccattctacttcaattaaaacctgaacctttggaaataaaatacacgatccctacccaagtacaaacagagggagaggaagctcctcaaattactgtaaaagtaactatagaagcggaagaaaagggtcaatatacatataaagataaaaaactcacctttgtaatcaaagccacccaagtggaagtagaaggagagccgcttgaaaacttttcggttaccacattcagtttcgacatggtcaaaaagtaactgatcggataaactttcccaacgtattttcattatgatgggaattacctccaaaaagagtatgcctgcacacagcgcgcatactctttttttatacctttgtgaaataaccaacgatatgaaaatgactacaactgaaaatatccggaaagaattacaaacattagcagattccaaatatcaggaatttcattcttccctcctcccgggagcaaacaacattctcggcgtacgcatcccccaactgcggacaatggccaaagaaattattaagaaagaagactggcgtacatttgtcgaatcaaccgatacgatttattatgaagaaacaatgcttcagggaatgattatcggactggcaaaaatggaacttgaagaacaaatgaaatacgtaacgatgttcattccccgtatagataattgggctgtatgcgacatattctgcagtgaactgaaaacttctgtgaaaaaaggaaaagaaaacgtatggcaatttatccaaccctatctgaaatcctctaaagaatttgaaatacgtttcggaattgtgatgcttttccattatgtagatgacgcgcatatcgattcgttactgaaatatgccgactcattcaatcatgatgcatattatgcacgcatggctatggcatggatgatatcattgtgttttatcaaatttccccaaaagacaatggagtatctgaaacatagcacactggataactggacttacaacaaggcactgcaaaaaacaattgagtcattccgggtagataaggacaccaaggacattctccgagaaatgaaaagacgataaataccaagcacggcgaacatcctgccatcagcattctgttcaccgtgcttcttatttcttaccgtagataccgcttttattttccacctaatttattttttgtttgcaatccggagaaacactaattcctcctgacctttttccttctgcttctacgtctttgttgtttctgacgattataacgctgccacttcttataaatcatccaaccactcatcaatgcaacaacgacgaaaataagaatagtgatacccactcccaaattatctcctttaatacgcgaccaaatatcaagaacttcttttgtcttatcgccaaaatcacgaatcatggcacatcgttccaccaccttacgatccggatattgtattttatcaatctgcacgctgtctgcacccggtccgaaaaagtaacttaaatcggaataataatgaagagtggtgtctatcttctcttccagtatttcgggagtagctatggaacttacatatccgcagaaatccatattccgcaaggctatatccggacgacacataaagttgataaaataactggccgcttccggattcctggcatatttcgggatcacccaaccatcataccaaatattacttccttcttcgggaacttcataatccaaatccactcctaccgcattggcctcttcaatcgcccagattgcatcaccgctccaagtcatattcagccaagctttatttttcgtcatcatttccttgccaaagtccgcttcccagccagcaatgttcggtttcaaggcttttaagtatttttcagccaactccatcgcacgtggagaatagtcgttcatcaactcttccactgttaccgttccctccttcagttcctttgcatgcgcataaatcacggctgttccataagcatcacgataactatccttcatcaggatctttccggcatactttttattccaaaggcaatcccaggacagggctaccgaatcgggcacataagcccggttatacagaatacctgccgtcccccacatataacatacagcatagcggctggctttttcacccggctgactcaatttattaatctgcttacgaataaatggagccacattattcatgtaattgggagaatgtgcgaaattcgtgtcgataggtagcaacaaatgcttcttcagcatacgctcgatgatgtattccgaaggacaaacaacatcaaaatcttcatgccccttttcaattttcgtcaacatgatttcgttgatatcgaatgtctggtaaacgatacggatattctcaccggtctgttctttataatatgcctggaaatcctcaagcacaccttcgccgatgtaatccgcccagttgtagattttaagaacccgctcacgaggttcaccggaattataacacccggtcaaagccaataagagcaggatagcaggaattattcttttcatattatttacgtagtagcacatttgatagtctattaatcttttttcttcgtttttcctgcccggtaattgattacaaccaataacgccagtaccacgacaaaaatgatagccgaaagcgggcgaagttccggggtcaaacctcccttgcgggcatcggcgtagatataagtagaaagcgtttccaaaccttgattaccgatagtgaatacagttacggcaaaatcatcaatggatagtgtcagtgcaagcataaagccgctaatcattcccggacgaatctccggaattatgactttccacaaggcctgcataggagtagctcctaaatcgagggcagcttcataaatattcggattcatctgcttcaaacggggcaatacacttaaaacaacgtacggggtacaaaaagtaatatgagcaagcactacggttgtgtagccttgtgtgatccccagagatacaaacaaaaggaacaaggatataccggtgataatatcaccattcagaataggaatgctgttcacaaatccgatcgctttgcgtgaacgggctttcagattgaatataccgatagcagcgatgcttcctaataacgtagatgctgttgcagccagtagagcgatagtgatcgtattaatcaatgcattcatcaaagaatgatgagcaccggtagtgaataacgaagaataaagtttggtagaaaatcccgtccagttacccaacactttcgcctctgtaaatgagtagatcacaataatcacgatcggagaataaagcaagagcagcaatatccacaaataagtctgtgcaaatatcttctttaccatagcccgcctccttcatttgagttttccttatcatcggtgctgaacagggaagtagcagctatcaatagcaacataatgagcgaaagtgccgctccatagttccacatactgttattgatattttcctgaatcgtcgtaccaaagagtttgatgttattcatcgtcagcaactcggcaatggcaaatgtcgatatagtcggcatgaacaccatcatgataccactcatcacccccggcatggaaagcggaaggactgctttcagaaagacttgcacaggattggctcccaagtcttgcgccgcctcgatatagctatgatccatcttctgcaaagtattgtagataggataaatcatgaaagggataaagttgtataccataccgaatatcaacgctccctcgcccaacggcacactgaaaaagtcgaataaggcaacagtggcaagggtacgcaccagaatatttacccacatcggcaaaataaacagtacgaccatcgtcttggaacggttcagcttgctgttactcaatatccaggcagcaggataacccaataaaatacaaacaagggtggtaataatggcaataccaatcgaatagacaaaggtattgattgcttcgggatgttcgaagaacttctgaaaattggcgagtgtcaaatggccgctatcatcggtaaaggcatatacgacaattaagaacaacggtataatcacaaagatcgccgaaaaaataatgtaagggagagtccaactcttacgtgatgacaaaaagactataaacctcttattcacttcctttcctgttaatcggttattttaactatacgaatagcatctggagggatggtaatacctacacggtcaccgtcatcccatacatcgttcgtatctacaaatacattctcgtcccaatctgacaatacagtcagatgataatggtcacccttgtaaaggatgaatttcacctcgcccgtcagcgttccgtcttcttcattatcctgaagaatcactttttcaaagtctacttccactttgacattcgtatcgaaagcgattccttccaccggaacacattcaaagttacagcccaggaattccacatgagtagcatccagcaattttccttcgaatgtattgcaaacacgctctttcttcataatatgaatatcgaaaggcttcaccaacagaccgacttcagcccctacttcaaaatgatggtaatcctgcaccaagaattcatatccgccgcacaacaccgtcatttcataatgcactcctttaaaaatagaagtctctaccactcctactaactgtgccatttccgaaacggggaaaatataaagatcctccggacgaatgactacgtccaccggaacattctcgccaaatccttcatccacacattcaaactccgtaccgcaaaaacgtacgagtttatcatgaatcatggtaccgttgaggatattgctttctccgataaagtccgcaacaaaagcattgataggttcattataaatatcaatcggcgtaccgatctgctgaatctttccttcactcatcacgacaatcgtgtcacttaacgtaagtgcctcctcctgatcgtgagtgacgtacacaaacgtgattcccaaagatttatgcatttctttgagctccatttgcatatccttacgcattttcagatcgagcgctgccagcggttcatccaacaacaacacttccggctcattcacgatggcgcgggcaatagctacacgttgttgctgaccaccggaaagagaatccacatcgcggtattcataatccgtcatgcctaccattttcaaagcagctttcaccttcttctcaatggtctgtttcggtgtttttttcagtttcaggccgaaagcgatattatcatacacattcaagtgcgggaacaaggcatatttctggaataccgtattcaccggacgcttatggggaggagtttgtgttatttccatccccgaaattcggatttcgccttccgaagctgtctgaaaaccagcaatgagacgcaacaacgtggttttaccgcaaccggaaggaccaaggatagtcacaaactcgccctttttcacgttcagagtcacatcatccaatgctgttttatcgccaaagtacttcgatacatggctcacctcaatgatggatttatcttcttgcatattcatactaaagtttgggctgcaaaggtacacatttctgcggtttccacctacgtgttaatctaatataacagtgtttttcgatgcccgacagaaaaaaaatctatctttgcataaatatttattcaccaattttacaaaagcatgaaaaagtttacttatttagttattgcaacggcagcgttaagcatggtagcttgtactggcggaaacaaagccggatacactattacaggtacagtagaaggtgcaagcgatggtgacaccgtttatcttcaggaagccaatggtagaaatctgaccaaactagatacagccgttatcaccaaaggtacttttacctttgaaggcacacaagattctgtggttagccgttatgtcacttgtgaagtgaacggagaaccgttgatgatcgacttcttcctggaaaacggaaaaatcaacgttgccctgaccaaggataatgacgctgttaccggtactcccaacaacgatgcataccaggaaatcagagctcaaatcaatgacatcagcaaaaaaatgaatgccatttatgaggcaatgggtaatacatctttaagtgatgagcagaaagaggccaaacaaaaagaaggtgctcagctggaagaacaatatgacaaagcaatcaaagaaggcgtacaaaagaatatcaccaacccggttggagtattcttgtttaaacaaactttctacaataactctacggacgaaaatgaggctttgttgcaacaaattcctgctaatttccagaatgacgaaacaatcgtaagaatcaaagagatgactgacaagcagaaaaagactgctgtaggtactcaatttgttgatttcgaaatgcagactccggaaggaaagacagtgaaattgtctgattatgtaggcaaaggaaaagtagtattggttgacttctgggctagctggtgcggtccttgccgtcgcgaaatgcctaacctggtagaaacatacgctaagtacaaaggcaaaaacttcgaaatcgtaggtgtatctctcgatcaggatggtgctgcatggaaagaagcaatcaagaagctagacatgacttggccgcaaatgtccgacctgaaattctggcaaagtgaaggtgcacagctttatgctgtaaacagcattcctcacactgtattgatcgacggtagcggtaagattattgctcgcggtctgcacggagaagaacttcaagctaaaattgcagaagctgtaaaataacaaatccaaagaaaggcttttccaaaggccttgaaatttatacaagactgtctcaaatagaaaatgagacagtcttttttatttgcgagactttacgcctcactctccaaacagataaaaaattcagcccctgtcattctcaaagaatacaggggctgaatgtatgtatgaaagtgagggaaatatactcccctacttttactcaagcaattagataaaccaacgtacgtagcagaagtcctgacggtgtggaagttccggattcttcgggaacatacggtaagacaccttgaaactacctgcatttgacaagctgtgtttaacctggaatgtatacaagtcgccttctttcttgactacactgaacggttctacagaataaacatgttgttttccgtctgcagttgtgtaagtagtaaccaattcaagtcccactgcatcattcaagcctttttcatcgataacgtaagtaatagtatattcttttccgctttcgatatcaccattcttcagctcttctaccttgtcacaagatacgatttcaatagaatcccatttagcaaccacatcttctttccaagctgcgatttcttttgcttttgcattatcgttagcagccaaagtctggaaacgttttgccagtttgcaatagaacttgctatagtaatcatccaactgacgcttcatggtataatgaggagcaatctgtgcgatagaattcttcaccactttgatccagccttcagaatatcccttcttattacgtgcataatacaacggaaggatttcagtttcaagaatactgtaaatagtagcagcatccagctgatcctgatgttcctgattctggtaagtacgtttttcagtcaacgcccaacctgcaccttcacggtaaccttccagccaccatccgtctaatacggagaaattgacaacaccgttcatcaaagctttttcaccagatgtaccggatgcttccaacggacgagtcggagtattcaaccagatatcaacgccggaaaccagacgacgagccagttgcatatcgtaattctcgaggaagataatcttacccaggaattccggacgacgagagatttcaatgatacgcttaatcaagccctggcctgctccatcgtgcgggtgagctttacctgtaaacaggaattgtaccggataatcaggattgttcacgatcttagaaagacgatccaagtcggtgaacagcaagtgtgcacgtttgtaagtagcaaaacgacggccgaaaccaatcagcaatgcgttcggattgatcttatccatcagtgaaacgatacgagaaggatctccctggttcttcaaccatgtatcgcggaatgacttacggatatagtcaaccaacttattcttcatagtcatacgagtcttccaaatctcttcatcgggcacattgtagatagcttcccaaatcttaggattagactgatcgaaccagaagttttcgttgaaatatttaaagtataattctttccattctgttgcactccaagttgggaagtgaacaccattcgttacatatcctacgtggctttcttccgggaaataacctttccagatagaagagaacatttcttgagaaacttttccgtgcagccagcttacaccgttcacttcctgtgaagtgttacaagcaaaaacagacatacagaaacgttcgcccttgtcgcccggattgttacgtcctagatccatcaagtcatcccatgagatacccattctggaaggataaccacccatatatttgccgaacaaaccttcgtcaaaatagtcgtgacctgcaggcaccggagtatgaacagtataaagagaagaagcgcgaaccaactcaatagcctggtcgaaagtcaatccagtagctacatagtcgcagatacgctgaacattaatcaatgcagcatgtccttcattacagtgataaacatctttcttgatacccagagctttcagagtcaggataccaccgatacccaacaagatttcctgtttcaaacggttttcccagtcaccaccataaagctggtgagtgataggacggtcgaattcgctgttcatttcattatccgtatcaagcagatacaaagaaatacgtccaacattcacacgccatacgtttgcatgaacaaaataatcaagataaggaacgtcaactatcaacggctgaccattggcatccattacgcgttcaataggaagttgaccgaagttctgtgcctcgtagttggcaatctgctgtccatccatagacaacgtttgagtaaagtagccgtaacgatacaagaaacctaccgcacacaaatcaacattgctgtcggaagcctctttcagatagtcaccagccaatacgcccagaccaccggaatatattttcaggacgctgctcaagccatattccatgctgaaataagctatagatgggcgttgctcatccggcttcacatccatgtaatctctgaatttcgtataaacttcattcattcttcttagaatcaccttgtcttttgccagcgcttccagcttctcatagctcatacgttccaacaacagtactggattctgtccacattctttccaaagttccggatctagatctctaaacagttcagtcgcttcaaaattccatgcccaccaaatgttgcgtgcgatttcagacaacttctccaactcttccggtatacgtgatttcacagtaacctctttccagttgggagtattcacattactaactttgattttcataatgttttcgtttacttattgataaataatttctttcttaactcaactgacgtatccttgccttacgcaaagcgatatcataagcttcataataatattgtataaagtgcttccataaagcctgctctgcaacttcagcagcacgcttacggatttccttcacctctttatcagtcttatccgcaaacaacgtaatcgtatctttgataccatccgccacttccgaataattatagtccgaacgatgcagcacttccactccatcattaatgccatgctggttcttcaggctgtttacccaaagtccgaatcctgccagatccgtagtgattgtcggcacatggaaagctacactttccagcggagtatatccccacggttcgtaataagaagcatagacactcaaatcctgccccagcaatatatcataatattctttattcatgataccatcacgaccatccagataacaaggaacaaaaatcacctttaccttatcttccggacgattgcccattcccagatatttcaacatgtccaacacctggtcatgagtcatattatgcagccaatgagtgataaacggtacttcgaggggagtgtcgaacttatctttgctcttcaaacgtgcctgcaaatcctcgcgaggctctcccacccaaccgggtacattgatgaatgccaacacattcttatgtagtttcttatccctgttcaagcggtttaatgattccaaaaaaacatcaatacctttattcttaaactcatatcgcccactggttccgacaattaacgtatcatcacccagatttgttcccaataatttattggcaacactaagcatcaaggtacgtgcgcgcttacgcttgccggtaaacgtgcttcctttcggcacaaaatcatcttcaaaaccgttcatcagaacaacatctgccggtttatccagtaattccttgcattcattattggttatttcactcaccgtagtaaaacagtctacataatgtgcagtctgtttctcaatcgagtgtttcgattgcatgttcagttcctgtgccatctggtcgccattataagcaaacagatagtcatacaacggcttattattgccggcaatggaacgaccgatagacgtagcatgggtcgtaaaaatagtagcaacctccggcacagcttcctgtacataaagtgctcccattccagtcatccattcatgtgcctgatataccaccttatccgtttccgtcaggttgtagcgatagaaactctccaccactcttcctgcggcataggaaaacatagaagcctcgtcgtaatcgccataggcgtgcaacgaatctacttgataacgattccacatttctgtgtatatatcgtctttcttttcaaaaaaaggttggaaatcaacaagaatgactatgggttcaccggggatattccatcgtcccacacggacagaaagttcgtctttctcaagcgcatgctctttccaggcagcacataggttatccgactcgatgaatagagggttctcctttccttgccacacatcaggacctatgaagaaaattctgtcgcggaatttttcctgtaatgtatttgcccgtgtcgacaagacggtatatatccctcccactttattacatacttcccagctggactcgaagatataatcgggggttaataaatcttttaccatataatatattaaaactctttttagtatgcgagtgcaaaagtacacattattctttgaaaaataatactttatacaaaaaatatgagttaagaagaggaaagaaacgttgtctaacaatgaaaaaagaatatccccttgcacatgcaaagcagcatgtacaaggggattgaaagtcctttataggaaatattcttgctaaaaattatgcaacgagtgcgctaccaatcaagaaggttgcagccaaagcaacgattgcatagagttcggggaatacggcaagaatcaacgtattgctaaatacattgtgtccctgtccgattgctgcgataccgtttgcacaaacttgtccctgacggatagcggagaataaagcaaccaatcccagagcaatacctgcaccaagcactgctgatgcctggataggtgtaatttcaggagtcaaaataccgaagattgtctgaaacatgaaataacctgcaaaaccataaagaccctgtgtacccggaagagctgtcaataccaggaagttaccgaatgcactatcattcttcttcaatgctccgatagcagcattacctgcaatagttactccgtaagcactaccgatgcccgacaaaccaaccataatcgcgatgccaatgtaggcgataaacaaattcatttccataatcttattctattttttattgtttaattcttaaaatattaattctcaatttctaattcttaatcttcaaattttcaatttctgaacggtttgtactctttaccgcctccttcatatccggagttcttaaagaactcaacgaacgtcagacgcatcgggtgaaccattgcacccagcacattcataaagatattgatggcatgaccgataacgaaaatcagtaccataacaatcgggcctgctattacattatccggactcatacctactgccaggctgttgaatactcccgccaaaatacctccggaaagtccgagggcaaacagacgaacgtaagacaatacatcgccaagcaaaccggtgaccatattatatgaatcccataatcccagtccgatattcaggaaaacattctttcccggactgttataaaggaagatcatagcagccgaaacacccagaataaccaaatgcactgtacttcccatcggcattacctccggcaacaaagccgaaactgccatggaaaccagcaggatgatccatccgatagttgccactgcatatttgaaaccaaactgaatagtctgattcaccgccttcaacaccataccgaatagtatctgaatagctcccaatatcaacgataattggaacatatcattgttatccatcaagacggcatgtttcagacgttgaacaatcggccagttcaaatcgtagatattcgctccgaagaacgtacctgtcagcaaaccgcagaagaatgttgaagcagccaatacctgtatcaatgaaatgatcgacttcattgacggagtcactttcttcgccatcaaccgataggccgtagctcccagaaacaggaacaccccatatccggaatctcccagacaaagtccgaaaaagaccataaagaacggggcaaagaacggagtcaagtccaattcattatacttcggaagcatatacaacttacagatcggttcgaaccaggcaaagaatcccttattattcaatcgaataggaacattatcgcccggcatcggatcggtaatctcataatatacatgtgcgtcattcaagtaagcctctatttccacttgactgaatgcaggtgcccatccttcaattaacatcagtttgtcaccggcagtctgttcggaacttaacaccaccttagagaactcaatctggctttgcaactctttcagagcagccttcaaggaaggaatttctgtttcggaaaacgtaaccagcttcttttcattctcttcaacggcctgttcggtcgtattgtaaagcgtttcaaggtgtgccaaagagtatgcaggtaatttcgcctgttctacatccaaatccacttcctgcccgcctttcgtcagagtcacgaagaatactttagaagagatacggttcacaatcattgcattgtattccgtttcccactcttccttgtaatttccttccgaacagctataaaaaccgattacataaccggcatttttcagcttctgaacattatccggttcaaagttaccccaggcttccagcgcttctttctctttggcatagctttgcaactgctgcgacagctttccatgctctgtttgcagggcatccacttcgtccagcacttgtataccacgggcagccgttccaccttccgtagcaattacagcattcttttcatgcttctgattctgaagcaacttcaaggtagccgccaagcgattggaaagacgaatattctcctgcaactccgtgttatcagcagccccctgttgtttctccacaatatggactaccccaagttcacgcagactgttcaggaattcttcatactctttgtgataaaccaggaatgtgagtttcttcatttttgtaatcatgcctctacctccttccttttttcttgatgggacttcatgatcttttgcgaagatttcgacaagttttcttcatcttccatgaatcgtttgatctttcgtaatgcatcctgataacccggtatctgcaccttctcaaaaaggttcaccttttgagtggtctttttccttgcatgttctaacaagttcagcttggcgagcataaattcacgttcaattgccgtatgagccagctcttccaatagatggataccgtcggcataccatttgggagcattaaacatactgtacggacgtatctcgaattctacattctcgagcaacggtacgcgcacacccgcaatctttttcacgccaagatgaacatcattcacctttattaatgaagcgtcaaactcattccaaagggcgaacatggcttcataggcttgaatttgttgttcgagcctatcctccagatcggcagcttccgttttacagcgtttcacttccatgcggagggcgctttccttattcttaatgataggaagcgtacgcacccgcactttcagttgcttttcgagctgctgaagagaggttttgttatattgaaactttatagccatctcgttgatttactaatttaacaatttacgaccagacgattgaaattacttcttataaacatatataatccgtccactatcatcctaatagcaaatcgtctaattgtctaattattttgtttcggccagtattgatccaccaagtctttcttgatattcacttcttccggacggaaatatttaccgaacaagccccaggcaacgtccagcatttcagtagtatcaagattgacatcaatagccaacaactgattggaatagtccttcgcaaaagccaacgtacgttcgtcgtagttggtcaggtcgaaaccattttccatcttcgtcttagcgttagcggcatcggcatacagacgtacagcggcattcatcacttgcggatggtccttacgtgtcttcttaccggttaccagctgtttcaaacgggacaatgaacggaacgggtcaacaattaccttaccgatatcactatcacgacgcaggaacaactgaccttcagtgatgtaacccgtattatcaggtacagcatgcgtaatatctccaccagacaaagtagtcaccgcaataatagtgattgaaccaccggaagggaactgcaccgccttttcgtaaatctttgccaaatccgaataaagcgatcccggcatagagtctttcgaaggaatctggtccatacggttagatacgattgccaacgcatccgcatagctcgtcatatccgtcaatagcaccagcactttctcattattatttactgcaaaatactctgcagcagtcaatgccatgtccggaatcaacaaacgttctaccggaggattttcggtcgtattcatgaaactcacgatacggtccagcgcacctgcattagagaacacattcttaaagtacaggtagtcgtcattcgtcatacccatacctccgaggataatcttatccgtttcagcacgtaaggctacatttgccattacctgattaaaaggctggtcggggtcggcaaagaacggaatcttctgacccgataccagtgtattgttcaagtcgataccggcaatacccgttgcaatcagttccgacggctgtttacgtcgaaccgggttcacagacggaccgccaatttccacttcctgtccttcaatgtccggacctccatcaatcggatcaccgaaagcgttgaagaaacgtccggccagctgctcactcactttcaatgtaggcgatttgccgaggaatactacttcggcattggtcggaataccctccgtaccttcaaatacctgcaaagtgacatcgtcaccggcaatcttaaccacctgtgccagtttaccgtccacagtggcaagctcgtcataccctactcctgtcgctttcagcgaacaagtagccttggtaatctgagtaatcttggtatatatcttttgaaaagcttttgttgccatctttgataattaaaattataaattaaagattatgaattgacacttctttcggcaatcaattccttcagttgtttctggaatccttcatactgttccgatttgaacttcgagtagttcatctgcttacagacattaatcatcttcttgaagtaatccattacttcgttgaagttatcaaagtcaaattccgtatgacagatgtcgattatcatgttcagaatatcttcctgacgttccatcggagttaccgcatcaatttcatcaaaagcatcctgttgcagaataacaaagtcaatcaattctgatttccagaaaatcacatgatattctaccggtacaccatcatcaccgaggatattgatctgttcggcaatttccttaccgcgctgtaaacgggttttcagttcgtttacctttccaatccattcatcgttgatatgacctttgatatactcctcaaattccgggtattcgatatattttgaataagaatcaatcggattcactgccggataacgtttcttatccgcacgatcctgttccaaagcataaaaacaacgggctactttcttcgtattttcagtcaccggctccttcaagttaccacccgcaggagataccgtaccgataaacgtaatagaacccgtttcgtcattacttagttttacatatcccgcacgaccgtagaagttggagataatagccgaaatatccatcgggaaagcatccggcccaggcaattcttccatacggttggacatctcacgcaaagcctgtgcccaacgggaagtagaatctgccatcaacaagactttcaatcccatggaacggtaatattccgccagtgtcattgctgtatatacagatgcttcgcgggcagctaccggcatgttggaagtattcgcaatgatgatagtacgttccatcaacttacgtcccgtatgcgggtctaccagttcggggaactcggtaaagatttccaccacctcattggcacgttcaccacaagccgcaatgataacgatatccgcttccgcctgtttagagatagcgtgctgaagcactgttttaccagtaccgaacggaccggggataaatcctgtaccaccttccacaatcggattcagcgtatcaatcacacgtacaccagtctccaataatttgaaaggacgcggtttctccttataattcgtcatcgcacgtttcacgggccatctctgaatcatagtcacaggaatatcatttccttcttcgtctgtcaggatggcaattgtatcttctatcttataatcaccttccggcatgattgtttttacggtagccgttcctttcatagtgaacggggccataattttcagcggctggaagttttcatccacctgtcccaaccatgcagaagcctgcactttgtcacctacattcgctaagggtacgaagtgccatacacgttctttatccaacggatatgtatattgtcctcttttcaggaaaactccatccatcttgtcgaggtcattttgcagaccatcatagtttttcgatagcatacccgggcctaatgtcacctcaagcatgtgtcctgtaaattcggcttcggcgcccactttcagtccacgtgtgctttcaaacacctggacatatacatgtgaacctacaaccttaatcacctccgccatcaacttatcaccaccggtcgagatataacaaatctcattctgagctaccggtccgtcaacgacgagggtcaccatgttggcaataacgccactaacagttccttttgttgccatatattttttttattttattatctgaattctgcaggaatctgcacttcgttcttcagcgattcgataatgcttctgaacaactgattacctctttccttatccagtgaaatccaccgttcaatcatttccagcttcagcaggaaagcgaaaatacgttcgatagtgaaatagtcgaagaaaatagcatcctccatccaattccaccgcaaagcatccaacttcttctcacgctccaccagttctgtaatctcactgattttcactaatgattcaaacacatccacctcaccggacaatccgaaatcgcgggcactcgatgtacgcaatgcttcgcatacttccgtatttcccacaacgttggaagcaatatcccatttgaatttacggctagtaaatgcaacaagaatattattgatgttcaggttgaattcaaaccaggcagaaacgaacttattcccacagttcatcgcatactcataatatagagcagccagatgatcctcgtgtaaaaccgtactttcagccggagtattcagataatcagtaataaaagtggatagatagaccggaaattctttaggactgatttctccgccttctctcagaatagaaatatattcagagagttcgtcagcagagtagtttccccgtttgtcgatttccgcttctttatctttgagaagtttcagcacatttgcattatcaaacttcagataaaacaagtcaatcaacttctggtctgaagcagacaatccatcgtagatttcagttttaaaatcggctactgtatagctcagtttgctgtcttccagcgaaagttccggcaaacctgctaccaagtaatagtacttactactcatagtcgcttcttttaaaatagcatttctactaattgaggacgcaagaacgctttgaagtaattcatgaattcttcttctccgaagttcaccttatacgaaccgtccgccggagaaacagtgaacagagttttgataccatttacttgctgaatggtcacccccttgtctaataaagcttttgcatgagctgcaaaatactttttcagtgattccgcatcggctgttgagatgacgataggttcatctatgctccatttggatgccaatgctacgataaacgcattcaggtaatctttatcctgagcgaaatctttcacggaagcggttatcaacttatcagttaccattgtagcgatttctgatttgagcgcattcacagcctgaccggcgaatagttttaactctgatttagtattttctgctaactcatcagcagatttacgagaggagtttacaattgattctgcctcttttcgggcatcctcaatgattttcttagcttcttcctgagcattcgcgataagtctctgcgcttcctcgtttcctttttccacgccttcacgataaatcttatcggtcaactcttgaattttgttttccatattaacaggagtatttagtattattactatattaactatgtgtcctttgtcagattctcgccaaatttacaaaaatcaatttgataaaaaagagaaagaagaaaagaaaaagatttgtttgcaaaaaaatcacagtcctacacctattttattccgctttttccccttttttattactaaatgacacatttaccgaatctttcaagccggtaaacaaatataaggaatctaaaagacatttggaaatatgtatatacttaaaacgacaaacaggatactaatacaagattaaataacaaaagctatcggtatttcaccaaattcatagaaaactaaaacttcggggagatctattcgacaatgacttaccggaagactgaagattgataattttcgcaaagtaccaaatgacagaagccccttgactcaaaatgaatcaaggggcttcttaaaaacggcggctacctactctcccactgttacgcagtaccatcggcgtgacgaggcttaacttctctgttcggaatgggaagaggtggaaccctcgtgctataaccacctgaagaaggttatgacatgatgaaaagtaaaatcatagtgtctagcaagctaaacgtatatacccaaccggtacatgtccgaaagaaagtgaacgggcaattagtaatgctcggctttgatgttaccacctttacacctgcatcctatcaacgtcatcgtctttgacgaccctaagaaatctaatcttgtggctggcttcgtacttagatgctttcagcacttatccaatcccgacttagatacccagcgatgcacctggcggcacaactggtaaaccagcggtcagtccaacacggtcctctcgtactagtgtcagagccacgcaaatttcatacgcccacgatagatagagaccgaactgtctcacgacgttctgaacccagctcgcgtgccactttaatgggcgaacagcccaacccttgggaccttctccagccccaggatgtgacgagccgacatcgaggtgccaaacccctccgtcgatatgagctcttgggagggatcagcctgttatccccggagtaccttttatcctttgagcgatgtcccttccatgcggaaacaccggatcactatgctctagtttcctacctgatcgacttgtctgtctcccagtcaagcgcccttatgccattacactctacggacggttaccaatcgtcctgagggcacctttagaagcctccgttacacttttggaggcgaccaccccagtcaaactacccaccaaacagtgtcctcgcatctacgagttagaactcaaataatcaaagggccgtatttcaacagcgactccacaaatactggcgtacctgattcaaagtctccggcctatcctacacatcaattacccaaattcaatgttaagctatagtaaaggttcacggggtcttttcgtcccatcgcgggtaatcggcatcttcaccgatactacaatttcactgagctcacggttgagacagtgtccagatcattacaccattcgtgcaggtcggaacttacccgacaaggaatttcgctaccttaggaccgttatagttacggccgccgtttactggggcttcaattcaatgcttctcttgcgatgacatctcctcttaaccttccagcaccgggcaggtgtcaggctgtatacgtaatctttcaatttggcacagccctgtgtttttgttaaacagttgcctggacctattctctgcgcccaactctcgttgggaccctttatcccgaagttacagggtcaatttgcctagttccttaaccgtgaatcactcaagcgccttagtatattcaacccgactacgtgtgtccgtttgcggtacgggtaccttaaagattaagtttagcggattttcttgggagtatgcttacacgcactattaccttattccgaagaatttggtatactatcaggttcgactcttatcccggatttgcctgggataatcaacatctacacccttcaacggactattccgtcagtccgcggcgctgtcactcctccgtctccacgtcactccttaaggtagtacaggaatattaacctgttctgccatcggcctcaccgttcggctgagccttaggacccgactaaccctgatccgattagcgttgatcaggaaaccttagtctttcggcgagggggtttctcaccccctttatcgttacttatacctacatttgcttttccacacgctccagcaaagctcacgcttcaccttcgacgcagagtggaatgctcccctaccgatccttacggatcccatagcttcggtaaattgcttaatgcccgattattatccacgccaaactcctcgactagtgagctgttacgcactctttaaatgaatggctgcttccaagccaacatcctagctgtcttagcaatctgacttcgttagttcaacttagcaattatttcgggaccttagctgatggtccggattcttctcctttaggacatggaccttagcacccatgccctcactcctgggatcgaactactgcgcattcggagtttatcaagacttgataggcggtgaagccctcgcatcttatcagtcgctctacctcacagtagtaattcccaaggctgcacctaaatgcatttcggggagtacgagctatctccaagtttgattagcctttcacccccaccctcagttcatccggaagcttttcaacgcttatcggttcggtcctccagttagtgttacctaaccttcaacctgaccaagggtagatcacttggtttcgcgtctactccttccgactaatcgccctgttaagactcgctttcgcttcggctgcggatctcaagatccttaaccttgccggaaaaagtaactcgtaggttcattatgcaaaaggcacgccgtcactgctgaagcagctccgaccgcttgtaggcgcacggtttcagggactatttcactcttctattcgaagtgcttttcacctttccttcacagtactggttcgctatcggtctctcgggagtatttagccttaccggatggtcccggcagattcacgcaagattcctcgtgtcccgcgctactcaggataccactacgcttcatttagcttcgaataccggactatcaccgtctatggtcccattttccaaagggttcttctcactaaatttcttgcgacatcgtggtcctacaaccccaatattgccgtaacaacattggtttgggctaatccccgttcgctcgccactactaggggaatcattattattttcttttcctacaggtactaagatgtttcagttccctgcgttagcctcttgctatgcaagatgtcattccttcagaatgacgggttgtcccattcggaaatcttcggatcaaaggttatttgcacctgcccgaagcttatcgcagcttatcacgtccttcatcgcctccgagagccaaggcatccgccatgcgcccttgcttactttctttcaaacgttttattctcgtactggtattggtagtggaattgcttccttctatcaatattgcgtactcgaacacgtacggtttgatatatacttttagctcttactaaaattttactttttgtacatcatgtcaaagatcgtttctctttttcagagatcgtggagaataacggattcgaaccgttgaccctctgcgtgcaaggcagatgctctagccagctgagctaatcccccaagaggttattcaagaattttgttttttagcttttagctttccctgttcctcattcttgagcttggtagtcccaggcagagttgaactgccgacctctacattatcagtgtagcgctctaaccaactgagctataggactagttcaaccttgtctacctttcgtctagactcggcttcttttttctcttgtttatctctatctatacttctatagatggttgatctatatattataaataaacaagtaccagtagtacaaaaaacagaacctttaaagtcttttagtggctgccacgttttgtgacagttacggcatcgctccagaaaggaggtgttccagccgcaccttccggtacggctaccttgttacgacttagccccaattaccagttttaccctaggacgctccttgcggttacgtacttcaggtacccccggctttcatggcttgacgggcggtgtgtacaaggcccgggaacgtattcaccgcgccatggctgatgcgcgattactagcgaatccagcttcacgaagtcgggttgcagacttcgatccgaactgagagaggtttttgggattagcatcctgtcaccaggtagccgccttctgtaccccccattgtaacacgtgtgtagccccggacgtaagggccgtgctgatttgacgtcatccccaccttcctcacatcttacgacggcagtctctctagagtcctcagcatgacctgttagtaactaaagataagggttgcgctcgttatggcacttaagccgacacctcacggcacgagctgacgacaaccatgcagcaccttcacaacagccttacggctatactgtttccaatatattctgttgcaatttaagcccgggtaaggttcctcgcgtatcatcgaattaaaccacatgttcctccgcttgtgcgggcccccgtcaattcctttgagtttcaccgttgccggcgtactccccaggtggaatacttaatgctttcgcttggccgcttactgtatatcgcaaacagcgagtattcatcgtttactgtgtggactaccagggtatctaatcctgtttgatacccacactttcgagcatcagtgtcagtgacagtctagtgagctgccttcgcaatcggagttcttcgtgatatctaagcatttcaccgctacaccacgaattccgcccacctctactgtactcaagactgccagtttcaactgcaattttacggttgagccgcaaactttcacaactgacttaacaatccacctacgctccctttaaacccaataaatccggataacgctcggatcctccgtattaccgcggctgctggcacggagttagccgatccttattcatatggtacatacaaaattccacacgtggaatactttattcccatataaaagaagtttacgacccatagagccttcatccttcacgctacttggctggttcaggctctcgcccattgaccaatattcctcactgctgcctcccgtaggagtttggaccgtgtctcagttccaatgtgggggaccttcctctcagaacccctatccatcgtagtcttggtgggccgttaccccgccaacaaactaatggaacgcatccccatcgataaccgaaattctttaataaaaatatcatgcgatattcgtatgccatccggtattaatctttctttcgaaaggctatcccggagttatcggcaggttggatacgtgttactcacccgtgcgccggtcgccatcttcagtttgcaagcaaactaaaatgctgcccctcgacttgcatgtgttaagcctgtagctagcgttcatcctgagccaggatcaaactcttcattgtaaaagtatttttatcatcccttaggatgacttttttgctctgttcaggacgccgtaaatttattgaccttattcaaatacctattagtcttaattgtatcactacttcataagacaagtattgacggttctatttttttacttgtactacttgtattgtttatcaatatttcaaagaacttgctgctttcgttttaaaagcgggtgcaaaggtaagggctttatttttaactaccaaactttttcggaagttttttagtttttctttttactcgatttctctggctctctatgcgaaagggaaagaaggtatgaaagaataactcttgccaatttcctttgcgaatcggactgcaaagataagaactttatttattataatccaaactttttcggaagttttttgttcttttctttaagtgggattccactttttcactaagtcaatttgtcaaggctttcttctcttggaaagcgggtgcaaaagtacgcccttttggtatacactccaaatatatcaaactattttttctaattatttttgagtacatttgctaaagtgctgacgcataacgatgttgtagaacatatttttcatgtatagggaaattgtgcgcggaaacgacgagagggatacacattattatatcacacgcgggcgcgtaaaggcgaaaaaggaaaaagcaagaagatgcctgtaagggaaaaatctgtagtacaaagactcaccaactcaacccatttatttaaacttaggtcaatacctccttttttcagattacagagtgcagaacggaaatgttcgagaatagtatacattctcgcttagtgattagtaagggctcaccaatgtgaacaaataagctatcaaatgtagacaaacaagctcactactgtaaacaagtctatctactatagtgagcccataagaagcattaagagtttacagaaagatcattaggtattaacctataattgatgaaagaatatagaataagagacggtacttcaaaagcagatactaatgacacactttcggcatttatatgatagaaaaaggatcaaaatagtgagatatgagattagttgtttacatccaaacagaagtatatttcactataaatcaataaattaaaagtaaaactaaaattaaatagggtgagggtaactttttaccctcaccctactgccacacgttccctcacaccttgcaaccacgatgaataaagggattgaacgaaggtgtgagggtgtgagggtaaaagtgatataaaaatataatcagctacaatttttcttggagcagaccgggctaaggaactactatcgttcctttcgctgccctgaaatcaagagttattatagtgttggcagcccatacataatctttgttcggttcatccatgccctctttacgcaaatagatttcaagagtctccggattaacagcatattcgcgtttccaagcaccaaatgaaggattaagattatcaaaagcaggaatataaggatgtattctgaaacgtcctccattaggtaaagtaacagagaatgttttcccgtcgctactttccgtaaaaggcaagatcttttcgttgtttcctccggctgccgttccatacccatagattacaggcttttggatggagatggtcttcgaacctaaatcaacgaaaatgatataagtaccactttgggggataaccaccagtccttcgtcagagatttcgaagcccacattattagtcagtccggtaaactctccatcaccaaatatcttggatgtagagaaacgaagtttagttccggcattgaaataattaatatgtatccatcggtcggcactgttccaaaccttatctaatgagataaccccatccgagccccaattcatgtttccaaattcatcgccaaccatataaatagccttcgctgttgaggggacatcacttggagaggcaaaagtcacagctattttacctctatcttgagagaaatcaagttctattggtatattagaagcaacaggaaccggttccagtgcagcacctacaccacgataatagatttgtccattatagatgttgaattccatagtgttccagtctctattgttatagtcggaagttgcatacatctgaagattgccttgtgttgtagtgacagcagagaaattctgcccggaaagatcgaacgatacttcctgtccgtcaaaacactcacctattccataaacggcaggtttctcaaaagctataagattacggttcatatctacatataccaaatacaggccgcttgtttctaccgtcgctcttccgttactgcctacaacataattgacatttgtacccaaagaggcaaaactttccgcatcagatttttccgatgcccatttaattccctgaccagcattgaaatacttgatagtccagaatgcaccattgccaagctgtcccacaggggccatctctaccacatttgtcgaattccaattccagtttccaaattcatctccaatcatatatagtttctccggatacccctccggttcgggttctatgatctcattgcccgtcatcttcgcaaagaattttcctgtcaagacttcatattgaagcgttactttatactcacctttgtttttaagattgagctgcacttgcgactggttggttagttcggcatattcttcagttaaaacattcatttttatacttcctcccgttccggtgtacatagaagagaatgtatatttctccgtatctgtttccttcacatcaaaagacgtattatcggtataattaaacgaaaactctgccggtaatatcacttctaactcgccactggacacccaggtagccacatggttaatatggtcgtaagacggtttttgaagaaagagttcgttttcaccgtcttctgtcagttcgaatttactcgtcaaacggaaattgaatggaacaatattaacctgtttcaataaaggattcacaattagctgatacaatccatcttccattactctgaaaccgccggttccaggagccaaagaataagttgacacctcactgttgtcgttttgcaaaagcgctccctgcccataataaacgggttgcccatccggtccgactaaagagatataaaaatctccgctggatgtcagccatgtgttcaatgcgaccaaagtgccctcttttatcacattcattttaccattgattgcctctaccgagaattgggacgcactccccgtcagatagataccttcgggaacattgatttcccgttcatagtgtatcccgtcgtcggcacaacgacagaaaataaatggcaacgaaaatacaaataataattttattatagttttcatcttcatgattacattaaattataaataactatactattggaatctaatggtatttgactaaaatttcacatcaaactgatgttgcttcttgtcttttccattcgctcctaccacatcaatcaccatttttccatcttttatcttacaaagcagatagctgttattatcattgacaaggatgggaaagttggctttatcgggttctgattcacggaaataatatttatgagtgtgtccggataacatcagatcaattccagccgtatttaaaacgggcaacaaggtttgctgcaaatgatagtttccatgccaattgcctatcgtcggcgggatgtgcaggaatgcgatccgaagggatgattgcttaaaatcgttttcttccaccacactccgcaaccatagggtttcttcttctcgataattgtcatagtcggcaataccggcatactccaaatccgaatccggcttatcttcaccggaatcaagaacaagaaaacaaaccttacctatgttgaaacgataataaaaagttccggtagacgtaggaaaatactttatcaacgcatcggaataaactccacgtgtttcatggtttccccggttgaaaacaataggcacttcggacgcaaacaattcgacacaagcatcaatataatctttacatatctgctcctgcccctctacccatgacgacatatctccattaagcaaaacgaaatcaagagatttgaaatctacttcccgacacagagacttcatatagtcactccgcccgtgaatatcatttaataccagaaaggaaatttctttcttccggtcgtcgaaagttctgaatctgaaaggttcttgcttgtatacatttgaagcagcaatcaatccataagttacccagtcactcgaaggccaagagacaacttctctcgaaaaaatccggtatctgtattccctgccgggttccaaatgtttgatgcgtacacggtggattgtatcattggcccgcttacgtccggactccgtatcgtaatatcgcggacgttccttcccatagaaatgatcttcaccggcaggcgccacttccacccacgaaagagtaggtttgtttgtagtccataccactgtcacgccgtcggtactcatatcacacaggtaaggaccgtgtgtgatctttatactgtcaccgtcatgtgcagaaagccgagcggcaaagatgacaaaaaatacaattatccaatttctcatagaacggttcctccttctaatttattagtttgaccgatatggtttgtaaatcattactgttgcagccggtcataatttcaaattcaccgggttctaccacatagttcatggcagcatcataaaagcctaaagctaaaggagaaatgtcaaactgaacggtctttgactcccccgctttcaggaatatttttttgaatgccttcaactcctttaccggacgcacaacagaagcaactttatcattcacatacagttgcacagtctcttcgccatctctgtctccggtattggttactgtcaccgaaacggagatggtctcctgtcgcgtatattctttttgggtgctctgcggaactgaataactgaatgtggtataactcaaaccgtaaccaaaaggatagagcggagcattcggaacatcgatatgccgggtggttgaggaatggggcatatctcccggacgtccggatttcttatagttatagtaaaccggtacttgtccctctacccgtggaaaagaaatggtcaatcttccggaaggattataatcaccgaacagtatatcagcaatagcggttcctgcagaagtacctaaaaaccaggtttcgagaatggccgatacgttcttgtccacccattcgatagacagcggacgcccattcatcaatacgacgacaacgggtttccctgtggcaaccagttcttttatcaattcttcctgcacacccggcaaatccagttgggcacggcttctcgattcgccactcatcaaagctttttcaccgacaacggcaatcaccatatcacttttggaagccaatttcactgcttctttgaatcctgacttatcttctccgtcaaaatcgcaaccacgggcatatccaactttcgttttgttaccgccgattttgttctttatgccctgcaatacagtcgtcacatggcgatcttcccctcttgctctccacgagcccagcagttcggtctgattatcggccagcggacctaccacggcaatggaacggacattttttgccagcggtaatgtatgattgtcattcttcagcaggacagccgatttatgagccatgtccagtgctgcatccagaaattcttttttcatgattgtctgcgattcgtattcttcattacagaatttatatggatcaacaaacagtcccaaagcatatttgatatgcagaatccgactgacggaattgtcgacatcttccatactgattttaccggcttctatcagttctttcatgtatttattatagagcccatctgtcatatccatgtcgatgccggaattgaaagccagacgggtagcgtctttatcgtcttccgccactccctgcgccaccagctgcttcactgcttcccaatcgcttaccacaaaaccattgaaattccattgccctctcaataagtctttgagcaggaacggatgtgcggacgcaggaataccatttatatcattgaaagcactcataaaagtaagtactcccgcatcaatgcaagccttaaaaggaggtagataagtatcaaacaaagtccgttccgacatatccaccggagcataatctcttcccgcctggggaagtccgtaagctacccaatgctttgcacatgccaatactgaattattctcccaaagattccactgaaaaccattcactcttgctttggctatttcacttcccaggtaggtgtcttctcctgctccttccactaccctgccccaacgggcgtctcttgcgatgtcgaccataggagcgaacgtccaatgtagtccggctgccgaggattcaatcgcagcaatcttggcagctcgttcgatcgctgctaaatcccaactacacgattccgccaaaggagtcggaaagattgtcttatatccatgaatcacgtccatcccaaaaagaatcggtatctttatccgggaataacgcatattcttttcctgcaaatcacgcaatgtctttgcaccggatatattcaaaacagaacctacaagtccgcgtgctatcaatgaatcgctcaaatattctgattcaggaccggttagaagggtacggcctacgtattgggataactggccgatcttctcttccacagtcatccgtgagagcaaatctttaacaaatgaatccgcttccggagtatgaggtagtttactatttccgacgatccgggtatgcggatcgcgaacataaactcttatccaatcaatatcgaaatcaaattgctgcaattcctccgcaggatagccgacatccaacttgtcaaatgctcctacctgcccggtgatagcaatatcccaaactctgtccagccgattctctttacgagccttagtgataaaatcagtatatgcatcccccaactgtgtacgggtatgtatctggtaattgactttattatctatcagaaacgtaatgatggcatgattgttatcaacaggatcgggatctatctgaaccgcatatacatggaaattatctcccggcttatcgtctccgatttcagtatatcgtatctgacctttgggtagattgattcccaacctttgcgtttccgaattgaacaaatgcaaggtttgattcgctttggccggataaggattttccccgaaagctttggtaaaaaactccagtatatctatttcggctactccagctcctttataatgcctcaaccaaagtgcattccaaagcccatatagatatgggactttggctttgatctctatgcggcagaaaagaggataatatttctccgtatcggaatctctgctggacagcgctcccgaccaccatccggtcttgctcttcacactgggatgaacgggactgggcgcatctttacttttgaatgagtgaattcgacaaatcttctctcctgtaggaagggtttcgataaagacctgctccggacggtatgtctgaagcatggctttattttcctgattataggtgggtcgccccactttttgggaaccatatattccccaataccgggagtcaatcacatctccgttaaactcgtctccatcgtaataaatccatccgggaggggtttctgatgaaggaggaataacggtttgggctttcaccaccccgatacagcaaaatatgattattagaatctttattttcaacatgatatttctttttaatgatttaccaacccggattctgtttccagttcttcaactgcagaatctcactttcaggtatgggataccaatacattttagaatcaaacactctcttttctaccacagcacgggaataatcaaacttctcgacgggatattccggcttttcaggaatctctggttctgtttcatcccgggtaaatacacgtacccaatctacatccatcgaaacgtttctcaaattggcattcctgtcttcgggatagccgataccattttcattctttcctccgatttgtccggttatcgcaatgtcccaggttcgcttttctcttccctccgctattgctttggttataaatgtattatatctgtcatcatagtcaatcgtcttgaatgtattggttactttaccatccaacaggtagctgatgatagcatgcttatccggagaaaccgggtccggatctacctgaacgccatacgtatggaagtctgctcccggatcaaaatcaagcactgtatgtcgtccgtacccattcacgttgattcccagattgcctgttttattatcatgcaaatgtaaagcctggctaagccggcggggtgaagccgtattctcaaattccttgacgaaaaactcttcgatgtcaagttccgcaacactggctcctgcataatgacgacaccacggtcccatccatataccatatatataaggtatttttgcacgaatctcaatgcgggaatgcagagggtaatatttcccctgataaccatatttgtcggtatcccggctggacaaagctcccgaccaccatccttctctcgtactggcagtgcttaatgtcggagccggtggattgtcgtccttggtggctgttatccgggcaaagctcaatccgccactccctttctcaatcgtaatctgttttttacgataagtctggatatttccagtgggttgtccatactgtgagtttcctaccggagtgtcgcttccatactgtccccaatatgagttgtttacgaccaaatcattgaattcgtctccatcgtaataatgccatccttccggaacttcgttaaccggtattacggaattccgggtaacagctcttcgagcctgattcttacgggtgatttcaagacctagcaaatctcctccgagtgtttcttgcgcaatcttccaccgtcttacatcccacgaacgatgttcctcaaatgccagttcgacacgacgttcacgccggatacgctcacgcatttcgtcctgcgtcaatccggaaggcagattcggttgtccggcacgattgcgcactcgattgatgtactctgctatatccgtattttcgggatcgtactcattcaaggcttccgcataattcaggtaaatctccgctaaacgaaataacggccagatatgtccctgacttcctccgccggtttggatattcacatcttcattgaggtactttttcagatagaatccagttttggttgcattggtaacgcccagaccgtcttttccaccgtcccaattctctaccgccgtgcttttccaaacggaatcattcagcagaatggtagcattcaacctgtcatcccggtagaattgcggacgaacggcattttcctcattctcccaactaaaatagctgccatctttcatttcataagagtctaccagattcaacgaaggattgatgccgcctaccccaccataactgacaggaaagttgtatttttcaaagtcggaattgtttccataacgacgcatcagaataaactcggaattctgaaagttattcttgaataaagtggcataactgccatacaacgaatatatgcccagatcaattacgtctttcgcagcctgtgccgcagctttccatttctccatatcggaaggaagatcgctttccgaaaaattctgccagtccagatacaagggactggccgcatacaataaaactctgcttttcaaagccaatgcggctcccttcgttgcacgtcccaaatccgaatcgattcctcgtcccggagttaaatcgagcacttcggctaccttatcacattcgctggagatgaatgagatgcaatcgtccatagacgggcgtggagtctccgaataatccgcattgacggatagtgtagaagtaatcacaggtacaggtccgaaacgtttcaccagctcgaaatggaaaaacgctcttaaaaaacgggcctcatatttccatgttttcaagtcattcagacggttctgatattcattctgattatccggatcgagtctgtatttatccagattcactctgtctacattttctataaattcattcgctatgcgaattcctgcgtaatacttattccacaaatcatccggattggaccttgaattccaggctccggtgttgaagtgctggatgttgcaggaggcattagcatgttcggcatcatcggtagcggcatccaacatagcttcggaaccgatacggttgaaaccatcaggcagataccgataagcattgactagaaatttgcttgtacgttcataggaagtaaaggtcatctcgttgtcgataaacgaatcatactctctgtccagataatcactgcatccggacaatatgctgatagcagcaagagcattcaatatgatagataaacctattgggtatttcataattattatatttttgttcttacctattaaaaatcaatttttattcccaggttgtaggaacgtgtcaacggatatgtaatcaaagaactgctttccgggtcggccaatccgtcaagatgactcacggtgaaaagattgctcgcattagcatacacatacaatctggacaattttatcgctcttgctattgactgggggaaggtatatccaatccggatattcttcattctgaagtagtttccgtttcttttccaatatgtagatatccggtaattgttttcaaatgtccgggtagacaaacggggataagaagcattgggattctccggtgtccagctgtcgagagccagttttgaagcagagccattgtcggtaaaggaataagccaacggcccgctcaaatagatgtctctattggcaacgccatgaaataaagcctcaacgtctatccctttccattcaaagcctattttcaaagcataattccactccggaatattagaatatcccacaggataggagtcattggaatcgactactccatcaccatttttatcgatatattttatatcaccggggtttacttctccaaactgcggtaccggtaaatgtgacttcagacttccattcgaatcgaaatcactctcctgatacagtccgtcagcaacaagtacaaaaggagtattcacggaacgtcctttacgatattgataatcgtagagtttcacttcttccgccatatcgacaatttcattctttgcataccacgccgatgtttcaacgtaatagttgaagttgtttttaagactgctttcgtacctgatcgtaccctcgaaaccttgattctttactttacctacattcatataaggcaatatgtcgccataagaggctccaacaaatccgggaatagtggaatacggctgtgacaggatatcatatctttctttatggaaataatcgaattctaccgacagccctttcagtaaaactgcatccaatccaatattgaatacacgttccttctcccaactaatatcgggattggcaatcatatctgcccgaaacccgcctgttgatgacgaccctgtacctaaaaaataggagccgttactgctataagtctggtcgaacagataacgtccgttctcattctgattgtttccaaccagtccgatagatgctcttagtttcaaatattcaacccagttgatatttttcatgaagttttctttcgacagtatccatccggcggagaaagcgggaaagaatccatatctttttccaggagcataatcatcacaacctgtatatgaagctgcaaattctcctatgtatttttgattataagagtaagttacccgccctgcataattcaagtatttaatgtcatcacgacttccatatttctgatataaatcagacaggaaaaagatgctggcagtgagttgatgttgcttgaaaacgcgatcataatccaactgtgccttaaagttcagacggctccagtcagtacggaatccttcatcggattccaaaggagaatcagcgccgtagggtgtatatagcacctctccccctgctcctttggaaagagaataacgggcataattctgattctttatagatgaatccgccatatagttgttgtaggcaataccggcactgacacttaatccctttgtcagtttctccaggtcgtatttaggcataaaaatcagttggaaagtccggctgttttctttataaagccctctgctgacgatattaccgaccgggttggtaaaagcggcatttcctccatacgatccgtcggggttgtacaccggaaatgcattcggagctgttctccatatcgctcccaaaagtccgttggcagaactgctgcctccgggaatagagcgattacctacactcccgctaaaattgagtccggtagacaggtgtttgcttatctggatattcaaattagacctgaaattaaagctcgcataataggcattcgagttttcccggcgttttttatcggtgtctttgtagaaaccgatgttctgcaaaagattcatcattacatagtattgcaccacatctcctcctcctttaaaacttaaatcagccatactcaaaggagctgtattattcaaaatggcctttttccagtttacattggggtaaaagtaaggatcggtgttgttctgataggcattcaattcctctggagtgtataaacgaggcaatccgtcattcacacgcgcctgattgtataaggtggcataatcatacgcattgataggatcgggaacgcccaacggttgttgtattcccgtttgtaaacggatactgacttgcggagcggaaacgcatcctttcttggttgtcaccaataaaacaccatttgcaccacgcataccatataaagccagagccgaagcgtctttcaataatgttacagactcgatttccgcagtggacagactttcaatcggggcttcgaaaccgtcgacatataccagcattttttgtccgcttgcataggaagtacgtccccggaggtagagattcgcgatagagaaatcatagccgggctctccgctttgttgcaacaatgttagtccgggaagctgtccttgcagactatttcccaagcttgcggaagtagttttcagcaaatcttccccacgtatggaagaaatggcacttgttcgcctccattccggttgttgcccataggcgacttctacaagtgcagaatcggctatgtgttgagcaaacaaaacgggagcataaaaagtgagaatagtagtcaaaagtatagcataacgcttccctttgtatatactgtttattattgtcataccttttatttttagttgattgaacatatttaccatcccggattctgaagcatataccctttatctatttcggtctgcttgataggatgtaaataagaacggtcactccataatctgttttcaaagacataaggtttgtaatgtactttacccggtgctcctgtaacagcggagagctgcaatccatacatggcacctttcataacaccttcatcatcggctatcagccaacgtcttatatcccagaaacgatgatcttcataagccagttccacggctcgttctcttcgcagtttctccctgaactgctttttattcaaagtggaaggaaagcccggcattccggagcgttcacgaactttcaggactgcatcgaatgcttctttcgggggagtttcataatattcattcaaagcttctgcataattcagatagagttcggctacccggaagacaatccagtccatattagtggagttgcgcggagccgttgctcttagtacgcgaggtacccatttgcgaaccaggtgtttcgttttatcattggctacattgtgagctccaccgggcagaaaattaagaattccaatctctgtattccagttagctccatgtgctgcaatggtttgcgcaaaacgagggtccagttcgtcgtacttttcaagcagatcatcgccaccatccatattccatgtttgttggttcccgtcttttttctcatagaaacgcacgaaattgaaggttgtaaaaagaccgccgtcgctccaactacttcccgcccatgccggtatattgcttgttatgggatgactgcttgttgtgaaattccgatattttttgttggccagaattatttctttgttatcgggagcagtccacacatgttcgtaatttgtttcaggtgttccctcatcgtacaagtcataatagccagaagattcaacagcggtaatggctgccttggctgctttagcagcttcattccagcgttctttactatagtttccatatcctatcaggtcattatttccacttaaaggaaggtacggatcgtcggtattgaacaaaggactcgccgcatacaggagtactctggatttgagggctaaggcggctatcctgtttgcccgtcccaccaatatcgaattcgtataataatccggtaatatggaggcagcccggtcacaatcgacaagaatggagtctacacaatcggaaaatgtattacggggtagtttaccatcttccgacggatttattctacggtgtattataggcagtccaccatatctatatactccttcccagaagaccaaagcccgcataaaataggcttcgcctctggaacgtgtcttaaaatcaacgtctcccggatcatcgggcacttcgtcaatacgttcaagcacgatattgcattttcgtaatgtctgccaacgggtgttgtgacgggggtcttcatcccagtctatgctgctgttgttatgattgtccacgttccacgaggcattgcccttcccccagtttgcaccttgttcggcttcatcacacgctcctgccagggttgaggttgcacacaatttacggtcgatcccgctacttcccatcgagaaccccagcggcataccttctgcatagatgcctgttatgtattgttctgtcaaagtcctgtcggcaaagacaccgtcttcatccaaatcgacagagggcggagcttccagatagtcactacacgaaaacatcaatacagacgacagaagtattgcacatatatatgttattcttttcatgattatcaaaaatttatattaagaccaatattatatactttctgcaacggatatgtattgatttcaacatttccacttctcgaaggtgcttccgggtccagatctaccacatctgtccacgtgaataaattggaaccgttgaaatataatcttacactattcaggttaagccgtttgacaaaacctccggtaaatgtatatcctacttcgaggtttttcaatcgcaaataactggcatcccgtatccaaagagtagaaggacgatagttgtgatcggtttctccgttgggattcagagacaaacggggaaaggtgatcttttctcctgcctcataccgttcctgtgtccaacgttcttttatcagagatttcgcactctcttctcctttcgcgaaaggccacatcgaccgtccgaaatatttaatggatacattgtcggctccctgaaataagatggagaaatcaaatcctttatattgcgctccgaatgagaaaccgtaaataatctccggtacgggggtgtatcctatcggaaccatgtcgtaatcatcaatcactccatcccggttgacgtctacatacttgacgtctcccggttgcaactgattcccgctccatgaacttttaggacggtctaatgcattgatttcttcccacgagttatagtatccgtcaaagatcagtccgaaaaactgattctttcttcttccggtagtcatctgataatcatatctcttctgcacttcatccatgtagatgatttcattcctcgcaaatgaataattgaagcgtgcccaataatggaaatcttgtatatgatgtctaaaattaaggtccatttcccaaccgcgattttccatttctccaaaattatatgcaggaagattagcacctataatcatgggggatgttgatctgttggctaatatgttatttcgtttttctttgaatatatcaaatgaagcagtcagacaattattgaacagattaatatctacaccgacattcatctttttcgccttttcccaagtcaaatcaggattaccgattttattttcaacaatcatcagtgaagtatacggattggaagccaaaccgaaattatacttgttcacacccgaatcgctcgctgctccataagaagacggcagatacaaaaatcgatcaccacctatctgatcgtttcctacctctccgtaggaccctctcacctttagatatttaacgatattgtttttcggaaaaaacttttcttcactgatgacccaacctaatgaaacagcaggaaaaaatccgaaccgtttgcctttggcaaaattctcggttccgttgtatcccatattgaattctgccaaataacgggaggcatattcataggtcaatcgtcctaccaatccctgataagcattaggtacataatattgaagggagggggaatagtatttactctgattatacagaataagtgctgtcgttttatgaagcccgaaagttctattataatcaattccaaactccatatatactttccggttcttatcccatccggtacttacagaccagatactctcttctgattgggggatcagatagatgtaatccggatcttccgcatcacggcgcgcaagataataaggaaaggttttcgaatatttcttacggctgtaataatagctatcatacgcgatactcccgtgtacggacaaacctttggtcagcaaagatgataaatcataattcagacgtaatgttgtattgatgttatttctattatctttctgataaccgttgcttaataaggtttgccagggattgacgcttcccaatccatcctgtatgcggacaattttattgtccaccaatcccggagagctcaagggattggcaaaagaaatagcttgccagattccactgttaccggagcccggagtaatcactctgcctatctgggcggccatttgaacagttgtcgaaaagtcccgcgttatctgaaaatcgaaattagttctgaagttataacgggtgttacggggatttacatcatgatccgaatctatcttggtatgtttatagataccggtctgatcgaaataacttcccgatataaagtatttcacacgttctgtaccacccgaaaggttgatgttatgttgagtgcgggtagaaaactttctaagaaaatcgtctatccagttagtgttcggatgcaaaatcggatcaaagccatttctgtacaattcaatatctttatccgtgaatttcggttggtaggtagaacccgaaacccgggagtcattttctaaagcttcattgtataaagttgcataatccgcactattcagataactggggagctgggtagattgctgcaaagcaaaattacccgaatagctcaaccggggacgccctctttcccctttacgggtagtaattaatactacgccgttagctccctttactccatagatcgctgttgccgaagcatctttaagtatattcaatgattcaacttcattcggatctatgccgtcaaaattagttcgttcgatgccatcgatcattattaaaggagccgtgttgtctgtaaatgtactgacacctctgattaacagactggaagcgtcttcgccgggagcaccacttctttgaaaagcaatcaatcccggcattcgtcctaccagcatgttactaatattggattgttgtgtctgtaccagttctttcctcgaaatagaagcgatagatgctgtcacactttctttcttctgctttccgtagccgacaacaacgacttcctccagactttgctcggcttcttttatttcaatagaaagcactttattgtcttttacaggtactgtcgtcgtgacataaccgatataactgatttccaaaactgcattcggatttacagataaggcaaagcgcccgtttatatcggaaattatgccgttaaatgtaccgacttccttgatattggcaccgataatcggttctccttttgtatcggtaatagtaccggttattctccgaggctcctgtggctgtgaagaaagattctttttcactgccgtttttctctttacaacaatctgttttccatttatttcatataccagatttgtcttttcaaacaaggctgacaatttttctgtgattgtcttcttcctggatagatctacactgacaacttgatttaaactaggtcggatatctttcgaatagatgaaaacgtagcctgtttctttctctatatctttaaaatattccagtagagtccctttctttatatcatagagttcgctcgttccatttccattagcgagagttacattcgctataaatagaaaaataacaaaaaatttcacaaacagatatgatttacaaagaaaatatgccctatttgcatgattgtaataggaattttccatatttttgcgtatcaatttttaggtttttcataagtaattgaaaaatttaaatctcacgggttcggaagagttgcctctcttccgaacttcttttttacaaaggcttcatttctgtggtttattcataggcattaaatttttagggttattactcgatttttatacttcccgcttcaattgtacactggacatcgtacagcaacgagaaggttttcatgacttgttctatatcatcaaataagataagttttcccattgtacacttttgcgcaacttccggcgtacatgtgatagatacattatagtagcgacttagccgttggataatatctttcattgtctcaccccggaactgaagtacgccatctttccatgaaatataatcgtaagcattaacttcgtcgatgccggatatcccatcactcaacttaaaacgctgattaggcaaaaggacaaaatcttcattggagtttgcttttacatttacttttccttctaccaacaccacggattgcaatgcatcatcagcataggcagacacattaaactttgttcccaatacattaactgtcagttggggtgtctctacataaaaaggccgggaagtatctttggcaacttctatataaatctctccttctacttttatcctgcgttcgcccggaccaaaagaggaagggaaacgtaatttacttccggaattaatccatactttcgatccgtctgccaatacaatggatgaatggctaccataaggaactatcagtgtattttgttttccgggttgaaccgctccctctttgattatctctgtttccttaccatcggattgaatagtaatattgctatcataagtaatgacggcattattctctatctgaatcgcttccgcatcatctcttatcagcattactttctgatacagagtatctgctttcacattgacaagcagatcatcagcagttccggacgtctgaaaagaatgaatcaaccagaaagaaacaatacctaatattagtacacaggcggcagcataacgggtaaataagataaaacgatgtctcttatcacgacgctccatgcttgtctctatacgtgcccacaatctttctgattcttcgggtaagcgctgaaccggattcagccgggcagataatatgattttgcgggcctcctgtagggatgcttgatcttcgggatgctctttttgataattaacccaccattcttccgattcctgggtaggagccagacaccacaatatgaagtcttcattttgtagccattgttttgtcgattcgggtattcgatctgaatgcatactcgttctttttacggtttcactttaaaaacacgcaaagaacaaaaatacccccacgaaaattaaagaaaataaccgaaaaggaaaaaataaataatttgaggctgaattttacgcatttgttcgatagcccgatacactaatttctgtgctgctttaggttgtattcccatcaatttcccgatttcctcatagctaagtccttgggtataacgaagatatacagcctcccgttgccggtctgtaaggctatccagcatctttttcagctgtttttgcatagcggctctttctttttcttcatctatgagttcaaagccgttcacttcaataaggaaactatagttatcagaaccttcttccagaaattcggtattcatttcttttttcttaatggtccgaatccggttcttcaaacagttcaacagatagaacttcatattctgactttcccaaagtttgtgctcacgctcatataaatgcaaaaaaacatcgtgaatggcatcttctaaaagttctttactaatgccaaaagcaatgccgtatgaaaacaaatcgttctcatacgtctcatataaccacttatataaggattgcttattcttcacactatcttcacaaaaagttagaatcctatcttctaaagaatattgaaatggtaattatcaccagcctgtctcatcccatccggcagcggagtaccattgtatcgactgacgataaaaaggatttatctcctcttcatacgactgacgaaatatataagtagaaagtcctgcagagccattcatcgagaaactaccgccataactggagtaattattaggagtagtcttccaataaaccacagcagcatcataagcagctttccaagcctcatattcgctagtctcactacctaaagaacgtattaatccatcaaaatcataataatacttactggaccgacaatcataacagagtatgcccgatgtggctatcgcttgtctgcccttaatatatttcggaataatctcactactgcttttatccagttgttccaacatggaagtgttcactacagaaacagagactcctgccgtccagggatcacctaagccccaattatatggcaatttgccagtataaagattttcatctgcataaaattcaaaatatgcctttgctatgtccgtagccgatgcattattggcaaacatagccggaactactttctgatatggagcacccggtgcgggtatctctgtcggagagcctataatgtaatccgcatgttccttcaattcatagaccacctcaacagattgcataaagcatgcatcgaaaagaagaaaactcaaatgaggcgcattacgcagaacatcttttaactcggaaatatccatgtaatttgaaccaccatcctgtccccaccaacgggttttattctgcgattttgccaaccatccttctccatgagaccacaaaaccaacccataactctgtgccggatattcagaaaatgccgtgttgataacctccttcatcttagagacatctacagaatttcgtccttcatacgtagcgattacctcctgtacgacattcttctttttatccttcttcaatcgaattagtttaggacttgatccggtatcaatgtatacgagtaggttataagagttatcatctacagactgcattccctctgtcatttccgccaaatcctctgtggcaaagctgcgaagagaattgtcacctgctatataaacaagaactgtacgcatctggactcctctttcatcatcgtcattatgacaagcgattaccagcatagccaaacacacaaacaaggagaatatttttatctttttcattagatttcaagtttattacgaggcaaagataaaaaaataagagatgcaaagctgcatctcttattatattaacaatttaactattgcttattattcttccggtttcgtaaagcggaatttatctgaatcaatccgcgataccgtcattctattattcttcttatatttattcagaatcttcgttgcttctttttccaacttctttctgttttccgagaagtaaatcatacatgtactattctgctgcagttggttatcctccagataatttttcaactgataactatataattcacgatgagccaagaacccttctttgctaaccttcgcactatctaatatctgaatatccgtgaaatagactaccgtatccgtaaatgaagcagaaattccaaaagcataaaccggtttagaatggtcttttttcagagaaaaagcggagcacatggtaaacacaagtgcaattgcaaatagtatttttacgtatttcatatcatataatttttaaccttgcaaaggtaacaaaaaagaggagattacctctatttatctcaaataaatagcatttcttagtcatagacccatagcaggactggtttcttttccgctttgagcaacccgtcaactttcctcatcacttcatcggatattacaggacacccttgactgattcctaacggaagatgcaaaggatacacctctgtttccggcaacggagtataagaatgcaacacgatataccgcttgaaagcattatcattcgtcgcttccaatccatgtaatttataatgaatattgattccccacttgctatacgaccggatacccaccttgtatttccccaaagaagagcaataactaccttccacattgctgaatacaggcttggacacagtgctatttttcccatatccatgagcacagagactggcatacttcacggaatctcctttgaaatcccatacaaagaaacgccttttaccagaatgaatactgaaatctaccagaaagcaataattcgtattatacccattcttatcacaataagcctttcccgcctgtgctttttcccgcaaacgctgctctactttaacaggcaccgaatcagaagaggatgccgcacattttgcatacgccaccatccctgctcccaaagcaataagaaccaatgatattaaaactgactttttcataaaactcacatagtataagattgaattatagaatggggcttatgtaaaaagtcgcataagtacattcttctatatgaaaagtgcgacttatgcgactcaaattcttttttctttcagaaactgatattccttacttatcccaagtaagatttgagcaatttactacgattactttgtctaagtcttctaattgctttttctttaatctgacgaacgcgctcacgtgtgaggccaaatttatcgccgatttcttccaatgtcatttcttgctgtccgataccgaaaaacatctgaatgatttctttttctctatcggttaacgtagaaagagctctatcaatttccctcgcaagagactcattaaccagagagcggtccgccattggcgaatcatcgttaaccaacacatccaacaggctgttatcctccccttccacaaaaggcgcatccaccgaaatatgacggccggataccttcagcgtatcagagattttatcaaccggaatttccagttcgtctgccaactcctcgggagacggacgccgctcgttttcctgttcaaacttcgagaaggctttgctgatcttattcagcgaacctacctgattcaacgggagacgaacaatacgcgactgctctgccaatgcttgcagaatagactggcgaatccaccatacagcgtagctaatgaacttaaatccacgtgtttcatcaaatttctcggcagccttaatcagtcctaaattgccttcattaatcaagtcaggcaaactcaaaccttggttctggtactgtttagccacagatacgacgaaacgaagattggcacgtgtcaatttttccaatgctacacggtcacccttacgaatgcgttgagcgagttccacttcttcctcgacagtaatcaggtcttcacggccgatttcctgcaaatacttatcaagagaagcgctctctctgttagtgatacttttggtaatctttagttgtctcattctttaaaaacagatttggagtgcaaagttacgacaaataatttgttaacatacaaaattaagtaacttttacactatatttttcatctaataaaacaaaaagagatgccgacaagttgattggcggcatcctttttctatttcattagcttatcctgcaatcttcttaccttatttttatatattactcttgagtcagatcgacagcgaaatatccgcgtttacctgatgggaacacaccggtcaggaataatacctggttcggagacttaacagcagctttcattacttcttccagatcgctgactttgcgcatcggctggtcattagctttcaggataatgaagcctttacgaactcctgcatctgacatcttaccggaagaaactcctgtcacttgcagaccgtaacctagattcaattgcttcttcaagtcatccggcaactctttgaaagcagctcccaggatttccatgcctgcatccttcacgatcttggtagtaccttgctcgttcttcaacgttacttcaacggtcttttccttcttatcgcgcatcagttttactttcaccttatcacccggacgatgtttagcaagtgcttcctgcaagtcagccatattggatactttcttattatccacaccgataattacgtcatcgactttgatatcagctccggcagcagaaccattctctacgatttcagaaacccatactccttctacaacacccagttctttagctttatctgccaatgtcttaccggatttgtcaatcggttgacggtcgtccatcaaactgctaccgatagagccaccacgaataccgagcaatgcacgttgtactgttccatattgtttcaagtcggcaattactttcgtcataatgctggtcgggatagcaaaaccgtatcctgcataagcacctgtcggagaagaaagcactgaattgataccaaccaattcacctttggcatttaccagtgcaccaccactgttaccctggttgatggcagcatccgtctggatgaatgattctataccaccattatatactcccagagaacgggcttttgcacttacgatgccggcagttacagtagagttcaaattgaacgggttacctactgccaatacccactctcctactttcaacgcttcggaatctcccaccggaatagtcgggaaatcatcaccctcaattttcaccagcgcaaggtcggtgctagggtcagtaccaatcacgcgtcccttaaactcacggttatcattcagtttcacactgatttcatccgcaccttcaatcacatgattattcgttacgatatatccatccttcgagatgattactcccgaaccaaaacctacacgaggttgagactgtacctgacgttgctgtccgcgtccatcaccaaaaaagaaatcgaaaatgtccggcgcttgctgaacagttcttgttttagcttcttgagtagaccttatatgtacgacagcatgaagtgaattctcggcagcctgtgtcaaatcaacaggttgagcgttcacagcgtcaaaagcagccaatttgacattgggattctgcttgaacatctcattaaaagatgtttcttttgcagattcgttagattgcaacaatttgtaagttgtcaatcctgcaactcctgagctaagaagaatgattgctcctactcccagaatgttctttgttgtctgtttcatgatttataattcttttaattgttaatattcgacattgttttaacttttacgacgttaaaataataacaaatatcgttcacttattctacttgtcactcttttttgtccacttttaacagagaatatttggagcttaacagcggttaacgacaacacctgacaaatttacattcgttgtatgtcagatggctttaacactctgacattcattcagtaaagtcagattttcatgacaccgattccaggtaagtcattcagagtgatctttcctttcaccacttccacccctttaaagcgatcattagagataagcaggttgccatccaggtcggcaaaatccactaatggcgagaactgtgaagctgcagaaatagcacaggaagtctctgtcatacagcccaccatgacacgcatgccgagtgcatgagccaatgtcaccatcttccatgcttcacgcataccggtacacttcatcagctttatattgattcccgtgaaagcgccttttaaagcggctacatctcccagacgctgcaaggattcatccgcaaatatcggtagcgggctctgttgtgttatccaggcaatatcctctagcttctccttaggcatgggctgttctatcatcacaacgcctttttctttcagccaatgaatcatatcgagcgcgtattggcggtctgtccatccttgattggtatctatcgctatcggaaggtctgttaccgaacgaatggtttcaatcatctccttatcattgtcccgtcccagtttcacctttaatatattaaactgatcggcacactcttttgttttcgcccgcactacatccggcgcatcgatgcctatcgtaaaggtagtggaaggtgtcttttctttgttcaatccccatatcttataccagggagcgcctaatagtttccctaccagatcatgaagggcgatatctaccgcagctttcgctgccgtatcctttggcgagaggctgtcaacgtatgacaaaatgtcatctagctgaaaaggatcactaaactgttccagattcactttcccaaggaaattcatcacagactctactgtttctcccaaataaggaggcatagaggcttctccatatcccgtcacgccttcatattctatttctacctgcacatcgggagttgttgtacgcgaataagtggcaactgtaaacacgtgcctcaacttcaattcataagggaaaaaagtcattttcatcttccctcccaaaccgagcttatttatatgaatggtagaaagcaacgattctccggctagtgcctgacgggctactaaccccgaactgaaagcagccaaagctgccgttttcaaaaaatctctcctgttctgcattcttttattgataaaaggggttcttatttgtggtattcattcctttctccttatttatataaggtaagaaacggacagcaaaaagtaaacgcttcgtgttgaattcatcatagttttgatccgaaggattcatgctgctgacgtgcacatctcccaatgcgtggataaactgcttgtttccgaggtaaatgccgacgtgagaaataccttctttacgttccgcagtcgctttccggccgaaaaacaccagatctccccgtttgacattagagaagtcaggagcaatatcgatatgttcgcccacataggcctgttgagaggcatctctcgggataataatgtcatgcataaaaagtacggtccgtaccagtccgctacaatccactcccttggaagaggttcctgcccatagataaggaattcccatcatcgagtaagctgtttcaatgatactttcaacatcttgtttcagtgaagctcgccattccgcttccggttgggaaatggatttcgaaagatatgctttccgtccgtcgggataagacacttgatagaaatgtcctttgctcccctcccacttcaaacgattgcccgcaacaacatcggatacgggttgggaactctcatccggtttctcatacgcaaatccgtagtgcgaggtaaccactatcttttctgcccgattccattcatcataccgttctttcgacatgggggtaattaccatccggtgcacccatccggtataatcatccggtgtttgtatctcgtaccaaccgttatactgaagcaccttgaccggcattcccaacaatgcctgcgtactcatgccggaagtaaatttgccttcctcgcgcaaattgcaaactgaaatatgtactaccccataagccgaatcggcaggcatgggacgtatttcctgtgctttcaggctagctgccatcatcgccaggaaacaatagaaaaggaggatattcttcttcattaaaatccattttaatgatagcaaagttagaaattatttctatttgtgatactttctttggctaaaacaaaataaatgacgtatttttgcagtctaaagcagttggccggtctgtcgcgtgcatgtttcgtgcaggaggaaagtccgggcaacatagagcatcctacttcctaacagaaagctgtccgcgagggtagagtaacgtagaagaaaataaccgccgctcctttcggggagaggtaagggtgagaaggtggggtaagagcccaccagtcgcatggcgacatgcgggctgtacgtcttaggagttgtaaggtcatgtaaaccggcgttatgagagttgctcgctccatgtcggagggtagaccgctaaagtgtcgtggtgacacgccactcagataaatgacaggcacctgatataattaaagattaataattggaaattatatgggtacagaactcggcttataggctgactgctttttcttttaattatccatttaattacaaatgactaatggatgaggatcgactgttcgagcaagtctgttgtaatcagtaattagttgcttgcaattagtaattagcgaagaactatgaagaagaaaatcaccgatatatggaagtttcttacgtatgacatctggcgcattacggaagacgaagtgacccgaaccaagttctcactctacaatattataaagaccgtctatctttgtatcaatcggtttaccaaagaccggatggccaataaagcttctgcacttacttatagcacattgcttgccattgtaccgatacttgccatcctgtttgccgtagcgcgtggtttcgggttcgacaacctgatggaacatcagttccgcaacggttttggaggaaatacagaaacaacggaggccattctctcatttgtcaattcctatctttcacagaccaaaggaggtattttcattggagttggtttggtaatgttgttatggacggttatcaatctggtcagtaatattgaaatcaccttcaaccgtatctgggaagtgaaaaaagcacgatccatgtatcgcaagattacggactatttctccatgttcctgctgatgccgattctgatcgtggtatccggaggactttctctgtttatgagcaccattctcaagcagatggatgatttcgtcctgctcgctcctgttatgaaattcatgatacggcttattccttttgtcctgacatggctgatgttcaccgggctgtacatcttcatgccgaacacgaaagtgaaattcaaacacgctctcattgcaggtattctggcagggtctgcttatcaggcttttcagttcctgtacatcaacagccagttgtgggtgtcaaagtacaatgccatttatggtagttttgccgcacttcccttattcctgctttggttgcagatatcctggacaatctgtttgtttggagccgaactgacgtatgccggacagaatatccgcagctttagctttgaccaggacacccggaacatcagcagacgataccgggattttatatccatcctgattatgtcactcatagccaaacgattcgaaaagaacgaaccgccctatacggctgcagaaatatcggaggagcatcagatccccatccgactgacaaatcaggtactttatcagttacaggaaatagaattgattcacgaggttgttaccgacgaaaaaagcgaagaaatcggttaccagccttcaatggatatcaatcaactgaatgtggctgtcctgctggaccgtttggacacatacggctccgagaatttcaaaatagacaaagacgaagaattcaacgacgaatggaaggtgctgaccgaatccagagaagaatactataaaaaagcaagtaaagtattactgaaggatttgtaggaaagtcaaaccttaaatcgcgagaatgaacttaacacaatattagaaaaaatgaaaaagctactgctaagtgcatttgtcatctgtctagcagggacaagcattgcacaagaatctcctttatggatgcgccactgcgctctttctccagacggaaccaccattgcatttacctacaaaggagacatctacacggtaccgtcaaccggcggacgtgccacacaaatcaccaccaatccggcttttgatacggaaccggtatggagtcccgacagtaaacaaattgcctttgcatcggatcgcatgggaagtctcgacgttttcgtcgtatccagtgaaggaggagcaccccagcgactgaccactcattcaggcagtgagaaacctgttgcctacaaagacaacaaacacattttattcacagccaacattgctccctctgccgaagatgccgggtttccttccggccagttccagcaagtgtacgaggtagccgtgacgggaggacgccccgctatgttctcatccatgccaatggagtgcatctctattaataaggagggagtgatgctctatcaggacaagaaaggatacgaagactattggcgcaagcatcaggtatcccctattgcccgtgacatctggacatacactcccgggaaaaaacctgtttatcaaaaacaaactactttcggaggtgaagaccgcgaaccggtatggagtcctgatggtaaatcattctattatctaagtgaagagaaaggttccttcaatatattccaacgtactcccggaaccaccacttcccaacaaatcactttccatacaaagcatcccgtacgttttctaagcatttcaaccaccggcacactctgttatggttatgacggcgaaatttatacacttactccgggcaaacaaccccaaaaggtaaatataagtatcctggcagacaagaatgacaaagatattatccgccaaatcaaatccaacggggctaccgacatcgctgtatctcccaaaggaaaagaggtcgcattcattatgcgcggtgatgtttacgtaacctccattgactacaaaacaaccaaacaaattaccaacacacccgatcaggaacgtaacatcagtttcgctcccgacggacgcacactcgtctactcttcagaacgcgatggattgtggcagctttacacttccaccatcgtacgcaaagaggagaaacaattcacctatgccacagaattgaaagaagaacgtttgacaaactccaaagtcgcttctttccaaccacaattcagtcctgacggtaaagaggttgctttcctcgagaaccgtaccgctatccgtgtcatcaatctaaaaaacaaggctgtgcgcacagtgatggatgccaaatatcaatattcttatgccgacggtgaccaatggttccaatggagccccgacagccaatggattctatcagacttcattggcataggaggctggaacaataaagacgttgttttgctgaaagccgacggaaaaggcgaaatggtcaatcttaccgaaagcggatacagcgacagcaacgccaaatgggtgttgggcgggaaagcaatgatatggaacagtgaccgtgccggataccgtagccatggtagctggggaagtgaagacgacacctatattatgtttttcgacgtcgatgcctacaaccgcttcctgatgagcaaagaagatattgccttacttgaagaagcggaaaaggcagagaaagcagaaaaagaaaaaaacaagaaagaaaaggcagagaagaaagaagacactaaagacagtaagaagaaaacgaaccagaatgagaatgcgaaaaaagacagtacagagataaagcctcttacattcgatttggagaatcgttttgaccgcatcgtccgtctaactgtaaattcttcccgcctgggtgacgctgtcatgagtccgaaaggtgatattctttattacctggcagcttttgaaggagactacgacctttgggagcataaactgaaagaaaatacgactaaaatattattgaaaggagttggcggcggctcactcataccggataaagaaggaaagaatatctttatgtgcacaggcggccgattgaagaaaatagagattgccggtagcaaaattacaccgatagaatttgaagcattcttcgattaccgtccttatgatgaacgcgcatacatcttcgaccacgtttgccaacaagtaaatgacaaattctatactgccgacttgcatggagtggactggaaaggatataaaaaagcatacgaacgcttcttgccccacatcagcaacaattatgacttcacggaaatgttgagtgaattgcttggcgaattgaatggttcccataccggagcccggtttgcagcaggaggcagcgcaatgcctaccgctactctgggagtcttttacgatgagtcatacgacggtgccgggttaaagatcaaggaaatcatgaagcaaagtcctttcacgcagaaaaagacagaagtgaaggcaggttgcatcattgaaaaagtagacggcacaacgattgaagccggtgctgattacttcccgttatttgaaggcaaagtcggacgcaaagtagtacttaccgtatacgatccttctactaaaaaacgttttgaagaaacagtaaaggcaatcagctatggaactcaaagcgagctgctttacaaacgttgggtagagcgctgcaccaagaaagtggaagagctttccggcggacgcattgcttatgtacatattaaaggtatggacagccccagcttccgcaagatctattccgaactgctcggccgttatcgcaataaagaagccgtagtggtagatacccgtcataatggcggcggatggctacacgatgatgtagtcaccttacttagtggaaaagaatatcaacgtttcgtgccacgcggacaatatatcggcagcgatccattcaacaaatggctgaaagcctcatgcatgctaacttgcgaagacaattatagcaatgctcatggcactccttacgtatataagactctaggtattggtaaactggtaggcgccccggtggcaggcacgatgaccgccgtgtggtgggaacgccagatagatccgtctattgtattcggtatcccgcaggtgggttgtatggatatgcaaggcaactatctcgaaaatcagaccttgcaacctgatattctagtttataacgaaccggcagccagcctgaaaggagaagatgcacaactgaaagcagcagtagactacctattgaaagatttgtcaaaaaagaaataaatatagcattattgatgccaccggaaaagcggcatcaataacacgctaactatcaacaccttaaaaaagccatttattggttttaaagaaacaggtcgttcctttaaaaggaaagcatcgttggtttaaaaggaacgtccccttcctttaaaaccaacgatgctttctgttatatgcttatcctaaagggctaagaatataattatttttcaatcaataacgattgtatgaaatcaccttttctttcggcttccttatcttcttacgtttttcctttgccggatagccaatgacaatatccagcaataaacgtttcgaagcaggaataccggcaagctgtttcagctctttttcatcgaaccaacccagaatacaagaacccaaaccttcggcttcagctgccagagaaatatgagcagccgctattccaatgtcgatcaacggaaaatgcttgccttttacctttccgccaagcagggaggttatattagcagattcttctacaaccagaatatgcacgggagcatctttggcaaacttattcattcccaagccagcagcagctttcccggctttttgagccagttccttgtctgtgatgaccacaaacctccaaggttgtgcgttgcaggccgaaggcgccaaacgtgcagcttcaagtacccgttccaacttttccggctccaccggacgttctttatcatacgaacggtcactttgacgagcctgcaccaattgaagaaaatcagtatatgccatttccaatcctccagtcacttatttatattttctcatttatattgaatcatccggctgatatacttgccgataatatcgaattcgatatttaccacactgccaatctcaaatgtatggaagttcgtatgctcgtatgtataaggaatgatagccacctggaaagtatcatccgtcggattacataccgtcaggctaacaccgttcacagtcaccgaacctttatccacggtgatatatccgcgtttcgccatctccttgtcaaacgcatatcggaatgtaaaataccagctgccttccgcatccttaatatcgatacaagtagcagtctgatccacatgtccctgaacgatatgtccgtccaaccgaccgttcatcatcatgctacgttcaacgttcaccttatcccccactttcaacaaaccgaggttagaacgctccaacgtttctttcatggcagtcaccgtatacgtatcatccgtcagagtcactaccgtcaggcatacaccattgtgagaaatactctggtcgattttcaactcattcacaaacgaacacttaaatgtaaagtgtatattctcctggtctttcaccagtgctaccaaagtagcatattcttctacgattccagaaaacataattctatttactatttacgattttacaattgaaagtactctcttaatgcaagggtcaaagatacgaataaggaagcagcttagaaaataagagcaaaaaaaaatggggcttttcacaaagctccatttttcagttttcaataggtattagtttttttttaaggtaaaaagattgttttcaggataacggtgcaaatataggcggttttaccgatactatccaaattataaaacatgtcatataacatctttttgaaaattctttggatttattatcatttgaagcaaaatctcctgtaacttgtccgttacaggagacaaatataagataattttttaaggagccctaatttctgtttaaaaatcggcagaaaattacttttccgggtaattttcatcggtttttccacgatgttttaacactttggcatcaatgaagaatacaatctcctcggcaatgttggtaatatgatctcccgaacgttccagtttacggaacacgctgactaaatctacgcaagtatgtacagcttccggatgttcgataatatagtctgaaagaatccctgttgcatccgcattgatttcatctagcaaattatccttagcaaacactcctgccgccaaatcattactctcttcattcaaggcacgttttgccagttccagcatcgacaacacctctgcctgcatctctgccaggcgaagacgagacaacagctccgcatccaataccggttctttgcaacgaagtacaaaacgggcgatcccttccgcaaagtcacccaaacgttccagatttgtgttaatcttcaacatagccaacacaaaacgaagatcaatcgccaccggattatacaatgcgataatatcttccacatcactatctatcttcaattcaaaagcattcaccctgcgctcgcgaaccatcacctgttgagccagctccttgtcaagggtcaacacagcctctccggcacggtcaagctggttgtacaccaaggtccacatttcatcaatttccttcttcaataggatgagttccgattctataaactttaccatagtctattatatataaatgattaatattctatcaattgggttccagatacccggattacccaaaacgtcccgttatgtaattctgggtagcctctttctccggattggtgaatatctttttcgtctgatcgaactccaccatttctcccatatagaaaaacgccgtcttatcactgacacgggccgcctgctgcatattatgcgtaacgattacaatcgtataatccttcttcagttcatgaatcaactcctccactttcgccgtagaaataggatcgagcgcagacgcaggttcatccatcagcaataccgaaggagagacagccatcgcacgggcgatacaaagacgctgctgctgtccgccggacaatgcataagccgattccttcaacttatctttcacctcatcccaaagagccgctcctttcaatgtttcctccacacgctggcgaatgaaagcattatcttttattccgttcacacgaagtccgtaagccacattctcgaatatgcttttcgggaaaggattgggacgctggaacaccattcccacattcttgcggagttcgtccacttccacgcctttcgcatagatattatgtccgtcgatacggatttctccctccagacgggtagcaggaatcaaatcattcatccggttgaaaagccggaggaaagtagatttgccacaaccggacggtccgataaaagcaacaaccgatttttcctcaatctgcatgctgatgcccttcaatgcatgaaagtccccataccagaagttcacatcacgcgcatctattttcactgtatccatatactaatttagttcgtttttactcttttctcaaaatactttctcaaggcattagccagcagattcaccaacaggataatcataatcaataccaatgccgtgccataagccagcggcagttgtgcctccatatccgttccactggtggaaatcacatacaaatgataaggcaaggccatacactgatccaaaatgccggtaggaagttgcggcaggaaatatgcggcacaagtaaacagaatcggcgccgtctctcccgaaacacgtcccaaggcgagaatcaacccagtgataatgttcggcatacccatcggcaaaataacatgccatatcgtctgcaacttcgtcgctcccaatgcccggctaccttcacgcatactgtcggggatggctttcaaagcttcctccgttgtccggatgaccaaaggtacgcaaagcaaacctaatgtcaaagagcctgccagaatactatcaccaaaccccatataattgacaaacagcgccataccgaacaatccgaatacgatggaaggaataccgctcaagttattggtcatcacccggataaagcgtaccaacctgcctttcggcgcatactcattcatataaatcccactcatcacccctatcgggaatgcaaacagcgcacttcccaccatcaggtagaaggtaccgacaatagccggccagataccgccacctgtcattccgtccgtaggagccgaagtgataaaatcccaactgatagcaccgattcccttatagatgataaatcccagaatcgcaaacaatatcagtacaatgcaaagacttaacaaccggaaaatcccgaaagcgagtttctgcgaacggtgtttagctttattattactccgtatttccatcttatttgctacgttttaatcctttagaagaaatatattccacactaaagttgataatcaatgttatgaagaacagtacgacacccaacaggaacaatgcctgatagtgcggaccacccgcaggagcctctcccagttcggcggcaatcgtagccggaatggtacgcaaaggctcaaggatcgttgtcggaatcacagccgcattacctgtcaccatcaatactgccatcgtctccccgatagcacgtccgatgccaagtaccacaccagatgtaatacccgaaatagaataaggaattactaccttatatatcgtctgccattgagaagcccccaacgccagactcgcttcccgcattgcacgcggacagttacgcatcgcatcttccgtcaccgttatgatggtaggcaatgccataatggccagtacgatactccctgccaggccgctctctcccaccggaagattaaacaacttctgaatcaacggaacgatgacaatcaacccgaaaaagccatagaccacggaaggaataccgctcaacagttcgataatcggtttcagccagttccgcactttcgggtttgccacttcagacatatagatagaaaccgaaagcccgaacggcaaagcaaaaagaatggcgaacagactcacccacaacgtaccggtaatcaacggcaggaagccgaattgagctgccggagtggccgtaggaaaccattcggcacccgcaaatacatctttcacggaaatggtgttatcctctatgaaatgcaccgcgtccggatgaacaataaacttctgcggaacaaaagctacgatacccggtgttttctctaccagttccgtaatcttgtcgcctgcatattcataagcaggtcccagctcctcttccgtataatactgcgttatatcctccaaacgaaaaacccggatagggagatcttccccaccgagttccttccagtttgtgatctcctcatcaaaaacattttttatctgtgcagggctcaacacactaactttgttgctcttattcagcgccaacacatatccctcttcaatcaccttactcttgaacagcccgaaagcttccgtgaaaaggaagagtacaatcagcagaatagtaatacttgtcacgaaaccgctacaagtcaacattccttctataatcctttcaaatacctttttcatacctactatgatttctgatgcaaagaaagcgtctctttattaaggaggtgtgactaacgtttgaaggaaatgtttcaatcatgttacgtttgtgttacaagtatcatttccattccggatgaaatggaaatgtaatatccgattgcttaatttgcaaagtcaataaaaagaagaaatatgaaagtgagaagaaacttattaatcgccctttccttactctcgctcggtgccaacgcacaacgtataaaaggtagcgacacggtactgcctgtcgcacaacagacagcagagcggtttatgaaccagcatccggatgcccgtgtcactgtaaccggtggcggaaccggtgtgggtatctccgctttaatggataatacaacggacattgcaatggcttcccgcccgatcaagttcagcgagaagatgaaaattaaagcggcaggagaagaagtaaacgaagtgattgttgcctacgacgccctcgccgtggtggtgcatccctctaatccggtgaaacagctgacccgccaacagctggaggatattttccgggggaagataaccaactggaaacaggtaggcggagacaaccgaaaaatagtagtctactcgcgtgaaacatcgtccggtacttacgaatttttcaaagagagcgtactgaaaaataaaaactacatggcaagcagcctttccatgccggcaacaggtgctattatccagtctgtcagccagaccaaaggagccatcggatatgtaggactggcctacgtgtctccccgtgtcaaaacgctttccgtgtcttatgacggaagccactacgccacccctacggtagagaatgccaccaacaaaacctaccctatcgtccggccgctttactactattacaatgtaaaaaatgaggaacaagttaaccccctgattcagtttattctttcatccgacggacaggacattataaaaaagagcggttatattccggttaaataaaaaaaatgtcctacttttgtagcctaaatacagataacattaaccgttatgacagatattaaaaacgaagaagcaggcgaaaagaaaagcttgaactttattgaacaggcagtagagaaagacttgaaagaaggtaaaaatggtggaaaagtgcagacgcgtttcccgcccgagcccaacggctatcttcacatcggccatgccaaagctatttgccttgatttcggcatcgcagaaaaacacggcggtgtatgtaaccttcgtttcgacgacacaaaccctaccaaggaagatgtggaatatgtagaagctatcaaagaagatatccaatggctaggctaccagtggggaaatgaatactacgcttccgactacttccaacaattatgggacttcgctatccgcctgattcaggagggaaaagcatatatcgacgaacagagttccgaactgattgcacagcagaaaggtactcctacccaaccgggtgtggaaagcccttaccggaaccgtcctatcgaagagagcctcgaactttttaagaaaatgaatagcggcgagatcgaagaaggcgccatggtgctccgtgccaagattgacatggctaatccgaatatgcacttccgcgatccgattatttaccgtgtagtgaaacacccgcaccaccgtacgggtactacctggaaagcttatccgatgtatgacttcgcccacggacagagtgacttcttcgaaggagtgactcattctctgtgcacacttgaatttgtggtacaccgtccgctttacgacctcttcatcgattggttgaaagaaggaaaagacctgaacgacaaccgtccccgtcagactgaattcaacaaactgaacctaagttacaccctgatgagcaaacgtaacctgctcacactggtgaaagaaggattggtaaacggatgggacgaccctcgtatgccgacgatctgcggtttccgccgtcgcggttattcaccggagtccattcataagtttatcgataaaatcggatataccacttacgatgccctgaacgacatcgccctgttggaaagctctgtccgggatgatttgaacagccgtgctacccgtatatctgcagtaatcaacccggttaaattgattatcaccaactatccggaaggacaggttgaagaactggaagcaatcaacaatccggaagatccggaagcaggaagtcacctgatcgagttcagccgcgaattgtggatggagcgcgaagacttcatggaagacgctcccaagaaatatttccgcatgacaccggggcaagaagtacgtctcaaaaatgcttatatcgtgaaatgtaccggttgcaagaaagacgaaaacggtgttatcacagaagtatattgcgaatatgacgcaaatacccgcagcggcatgccggatgcgaaccgcaaggtgaaaggtacgctccactgggtaagctgcaaccactgcctgcaagcagaagtacgtttgtacgaccgtttgtggaaagtggaaaatccacgtgacgaactggccgccatccgcgaagcaaaaaaatgcgaagcactggaagccatgaaagaaatcattaatccggattcattgaaagttctgcccaactgctacatagagaagttcgcagctaccctgcctccactctcctatctgcagttccaacggatcggttactttaatatcgacaaagaatcaaccccggataaactaatcttcaaccgtacagtagggttgaaagacacatggggtaagattaataaataactaagctttcaagcttaactttacaatggggctgtgtcaaaaggatcatcatctgaacttttgcaacagccccatcttagcaattaaaaatctaaaagtaaaatgggtagaaaaaattcgccatcagcaaaaaaggaactagtcacactaatcacaaactacgaagaagcaaaagcagaaaaccgacaactttatctggatgctgaccaattggccgacatcgccgactggtatgcctccgaacgaaaatttgaagaagcacaagaagtaatcacttatggacttaaaatacatccgggaaacacagatttgcttatagaacaagcatatctttacctggatacccaaaagctgcaaaaagcaaaaaaagtagcggattcgattaccgaagaatttgattccgaagtgaaactgctgaaagccgaactattgctgaatggaggaaaactggaggaagctcaatggctgttaagcacaatagcggatgccgacgagctggaaacaatcattgatgttgtatttctctatctggacatgggatacccggacgcagccaaagaatggctcgacagaggtaaatcccgttataccgaagatgaagaatacatggctctcacagccgattatctggcatcgacccatcaggtagaatcagccatcatctattacaataaactcattgacaaatctccattcaacccttcctactggatgggactggtgaaatgttactttgtccaggaacaaatagacaaagccatcgaagcctgtgatttcgcattggcagccgacgatcagtacggggaagcttatgcctacaaggcacattgtttcttctatctgaacaattcggatgatgccatcgagaattaccaaaaggcgattgagctcaaagccattccccccgaactgggttacatgtttatgggaatatcctacggtaataaagaagaatggcaaaaagccgatgactattacgacaaagtgatcgaacgttttgaagaagacggagacaagcagtctattttattgatagacacctataccagcaaagcattcgccctctctcacctggaaaggtataaagaggcgcatgagttatgcgagaaagccaaagagataaacccgaacgagggattgatttatctgacagaaggaaaactatacctggcagaggaactagaagacgaagctgccatctctttcgaaaaagcgatagagatcaatccgaacatagaaatgtggtatatgattgcctctgcttattcggaaagtgactatctgatcgaagcgaaagaatactttgaaaaagtgtaccagataaatccgaaatacgaagatgtgacggagaaattgagtgttctttgcctcatgcacggtgaaatcgacaacttctttaaatataacaaggaatgtgaacatccactggaagaagacatgatcctggatctgttgaacagtcccgaacacagagaagaagacgaaagaactctcaaagaagtgtgggaacgcatgaaaaaagagaataagaaaaaaacaaaaggaaaaaaataaatcaatttataaattctatcctcaaaaaacatggaatcagtagcagaacttcttaaatgggtattagaaaacttgaactattgggtagtcactatttttatggctatcgaaagctcttttattcccttcccctcggaagccgtagtaccccctgccgcatggaaagctatggcagacgacagtatgaatatctttctcgttgtcctatttgcaactataggagcagatatcggtgcattagttaattattacctggcacgttggttgggtcgtcctattatctataaattcgctaacagccgtttagggcacatgtgccttattgacgaagagaaaatacaccatgcagaagaatatttcagaaagcacggtgcagcctctactttctttggccgtcttattccggctgtacgccaacttatcagtattcccgcagggttagccggcatgaaaataggtcctttcctgctttatacaactctcggcgctgctatatggaacagcatattagctttgctcggatacctgatttaccgttttacagacctcaaaacgactaacgatgtctatgtaatggccaccgaatacagtcacgaaatcggctatgtcattatagcagtggtggtaattgtaatcgtttttttggcttataaagggctgaaaaaaagaaaataagtagtaaaatactcattgcaaagccacagaggacgcagagaacacaaagcaagaacatagagttaccggggcatccattattgtaaatcggctattacccgttaaattcttacttctttgtgtattctacgtcctctgtggtttattttttgtggtagataagagctaattagaaattaaactgaactcctactcccaatatctctttaaattgcacacgagcaccttttgtaccatccttttgcacgattttcacatcatcgtcatacatcaggttagtagtaagtgtggttgagaaccatttattgataatcatatttacttgtacttcccagttcacatctatattcagcggcttatgcagataatcggaatatagatccaaacgtgaatataccgtcatatttttcaagaattcatatttggcttctcctttcaagttagcaccgaagctggataatagatgtttgcccggatccactccataagctccttcgtcagagagacggtcattgagtacaaatgttccgcgccacgcagcaggagacaatacaacggtaaatatcttacccggatcatacgtaaagcccaaaccggtagtcaaataggcaggagccataaattcggagatagcaatgtctttattgacggagtagtcatatcctggagaaaactgtgtctggaaagtggcgaacgcactggcataccaacttttggcaatagcatagccataattcgtattcaaatagattttatcatttgctttcctggttccgtcgtcaccggtcttatttaatccataagccagttcgatacgattattccacagatgttttcctttcttataattaatctgataagtgccctgcaagtcaaaggcaacggagttatcacctccggcagcccaattagtgaggctcacttgcgttagtttcagtccggcaaatccttcttttgtccagggagaaatttgtgtactatcggcagtttgggccgacaaggttccaacgcccatacataacagggcgatgaatagagttttcattttgttcatgatagttgaggtttagtgtagaaaaaacacaacctaacaagaacggagccttggcagtttaccaagcctttttaccagttcccattaggtcaaaatctttaagataagtagcaggcttaagtattaagtattagccatattcgtttattagctgcaactaatagttaatacctaatacttaatactccatattctatattactttacagcagctaaggctttgtcataatcaggctcctgggtgatttcaggaacaagttccgtatatgcaattttgccatctttgccaatcacaactaccgcacgcgccaaaagtcctgctaacggaccatctgccatacgcactccgtaactttcgtcgaaatcagagaagcggaaatcagacaatggaattacattttcaataccttctgtcgtacagaaacggccgtgtgcaaaaggaagatccttagaaatagccaatactaccgtatctttcaatccggcagccattttattaaacttacgtacagaagttgcacatacgctggtatccagactagggaaaatatttaaaatcacatttttaccatttaaatctttcagagagaaagaagataaatctgtttttaccagctcgaagtcaggagctaccttacctacttgtataaattcaccgatcagtttcaccggttgtcctttgaaatttgttgttgccataatgcatgtatatttaaaatttactttatataggaaacaactattcccccaaatatgttcacggaaaaccttttctaaattcaatttgttattcctcaacgaaatcactctagtgttcaatttaaaatataaaatgtatggaaactgtattcaatgagattcaacattcagtaaaaaattggtggacttctcttcttttgggaatcgtgtatatcattgtagccctttggctcatgttctcacccgtaagcacctatgtagctctaagtatcattttcagtgtatcgatgctgataagcggtattctggaaatcatcttcgctcttagcaaccggaaaggtgtcccgagctgggggtggtatatcgtaggaggactcatcgacctcgttctgggtatttacctgattgcctatccgatggtcagcatggaagttatccctttcatcatagccttctggcttatgttccgagggttctcctccaccggctattccatcgacctgaaacgttacggaacccgcgactggggctggtacatggctttcggtattcttgccatcctgtgctctcttttaatattatggcaacccgccataggagcgctctacgcagtgtatatgatttcttttgctttcctcatcatcggacttttccgtgtcatgctttcatttgaattaaagaatctgcataaaagaaaataaaaagctttcggcacttactttgggattttgtttatctttgtaggcaatttacataaatcaattaattaaaaaggaagaaaattatggcaatgcatacatggtttgagtgcaagatccgttatgaaaaagtaatggaaaacggaatgcagaagaaagtaactgaaccttatcttgttgacgcactcagttttacagaagcagaagcacggattattgaagaaatgactccgtttatctccggagaatttaccgtttcggatattaaacgtgccaactatagcgaacttttccctagcgacgaagaaagtgccgaccgctggttcaaatgcaaacttattttcatcactctggatgaaaaaagcggtgctgaaaaaaagacttccacccaagtactggtacaagctgccgacttgcgcgacgcagtcaagaagctggatgaaggaatgaaaggaaccatggcagattatcagatcggtatggtatccgagactccgctcatggatgtatatccttacagcgccgaaccgaatgacaaaccggagtttgatccatcaaaagcataagtaacaatgagtattgctgacaatttaaagcaagtgctggccgaactccctcaaggagtccggctggttgctgtctcaaaattccatcccaatgaagcgatagaagaagcatatcaggcgggacagcgtatttttggagaaagcaaagtgcaggaaatgacagctaaatacgaaagtttgcccaaagacattgaatggcatttcatcggacacctgcagacgaacaaaatcaaatacatgataccatacgtagcgatgattcatggaattgatagttataaactgctggccgaagtcaacaaacaagctgtcaaagcgggacgtacagtgaactgcctattgcagattcacgttgcgcaggaagaaaccaaatttggtttcagtcccgaagaatgtaaggagatgttgaatgccggagaatggaaagagctgactcatgtacgcatctgcggattaatggggatggccagcaacaccgattgcattgaacaaatcaaccgggaatttggtttactaaataggctctttaacgagataaaaacaacttggttcatccactccgatactttctgcgagctgtcgatgggaatgtcacatgactaccacgaagccattgccgcaggaagtacgttggtacgggtaggaagcaagattttcggagaacgaatttattaatcaggagtaaaaaacatattgctatgaccgatttaaaaactactttcgcagggctttcccttagaaaccctatcattatcagtagctcggggctgaccaacagtgccggcaaaaacaaaaaattggccgaagatggtgccggtgcaattgttctgaaatcactgtttgaggaacagatcatgctggaagcagaccaactgaaagatccggctttctatccggaagccagtgactatctggaagaatatatccgtgagcacaagctatccgaatacctgactttaataaaagaaagtaagaaggtatgccccattcctatcattgccagcatcaactgctacactgattccgaatggattgactttgcaaagatgattgaagaagccggtgccgacgcattggaaatcaatatccttgccctgcaatcggaagtgcaatatacatacggttcattcgaacaacgccacatcgatattctccgccacattaaaaaaacaatcaagatacctgtaatcatgaaactgggtgataacctgacaaatcctgtggcattaatcgatcagttgtatgccaacggtgcagcagcagttgttctcttcaaccgtttctatcagccggacatcaatatcgaaaagatggagcatatttcaggcgaaatattcagcaatgcttccgacctcgccattccgcttcgttggatcggaattgcgtctgcagtagtagacaagatcgactatgcagcttccggtggtgttgccaatgcagaatcagtagtgaaagctatccttgccggtgcttcggctgtagaagtttgtagcgcagtctatctaaatacaaatgcattcatcggagaagccaaccgcttcctctctgcatggatggaacgcaaagggttcaggaatatagctcaattcaaaggcaaactgaatattaaggatgttcagggtgttaatacattcgaacgtacacagttcctgaaatatttcggaaagaaagaataaggaaaaagtatactaaatcaataaagaaaacggtgaacaaattgtgctatttgcaacaggatgttcaccgtttacttttttaatcacttattaatttatctcgcttagcagagaaatctgttataacaggttgcttgccagttcactcaattcacttcgttcacctttcagcaaattgacgtgtgcaaagatattctggtctttcatacgatcaatcatatataccaagccattggactgactatccagataaggttggtcaatctgctggatatctcccgtaaataccatcttcgtaccttctcctgcacgggtgatgattgtctttatttcattcggggtcagattctgcgcttcgtcaatgatgcaatacatttcgctcaaactacgaccacggataaatgccagagcttcaatcaccagctgctcgcttttctgcatatcttctatgcgcttcacttcggtagagtttgtagcaaactgacgttttatgacgttcaggttatcaaacaacggctgcatataaggagctactttttcctgtgcgtctcccggaaggaaaccgatatccttattggaaagcgccacaacgggacgtgccagcaaaatctgtttgtaatccgtcagcttgcccaaagcagcagccaaagccagcaaagtcttacctgttcccgcttttcctgtcagagccaccagtttgatgttcgggtcattcagaatctcaaaagcaaaactctgttccgcattccgtggttcgattccataattcttacccttcatcacacggataatagaatgggtaaaaggattgtagcgtgccaatacactattccggtcactcttcaatacaaaacattcattgggatgaatcaaatccttaaagtcaaattcactcaagtcaatgccttcctttgaagaataaatacggtcgatcaatgccggatctacattttcaaaaatctcattagatttctcgaacacatctacatttaccaccttatccgtaatataatcttcgcaaagcagaccgattgaacgggctttcatgcgcagattcacatctttggtcactaagatagatttcattttcggatacttgtcggtcaggtattcggttgccgccaaaatcaaatgatcgggtttctttataggaaacgattcccacactttggcagccggcacattgcttgtcacgacaaacagacgtcccaatccttcgccaagcttcactccgtcggagaaaagctcgtcgcttgtcagcacatccaattcgcgcacgaactcacgagcattgaaatttatctgctcgtttccttttttgaacttatccagttcttcgagtacaacaagagggagataaatatcattttcctgaaaattcttcaagcaattgtagtcgtgaagaataacatttgtgtctagcacaaaatttttcttagttcccatgatttcttagatttaaatgttgatatttgcaatctcattcgccaatcccccatttatagtcagattgacggttctaaagataaacaaattagtgggcaataaagattgcccgacgttaaatattataaaacatggactatcagaacactttaaagtacttatatgagagtgcgccaatgtttcaacaaataggaggcaaagcatataagccgggtttagagaccacacacaaattggacgaacattttgggcatcctcatcaacaattcaagacgatacatatcgccggaaccaatggaaaaggatcctgttcacataccatcgcagccgtattgcagtgcgccggttaccgggtaggactattcacctcccctcatttaatcgacttccgcgaacgtatccgtatcaacggtgagatgataccggaagagtatgtagtcaatttcgtagaagagcatcgctctttcttcgagccgctgcacccttcattcttcgaactgaccaccgctatggcattccgttattttgccgaccagaaagtagatgtagcagttatcgaagtaggcatgggcggaagattggactgtacgaatatcatccatccggatttgtgtgttatcaccaacataggcctcgaccacacccaatatctgggtgacacgctgacgaagattgccaaagagaaagccggaattatcaaagaaggagttccggtcgttatcggcagagcccaaggggcagtgaaacgtgtatttaccatgaaagctaaagaaaagaatgcgcctatcgaatatgcccgtgaaaatgcccggtactgggacatggaaatagttccttattcgaaattgcaagaaataagaccgatgatggacaacacaattcagagcatgcacgaaatgatcgaagcaatggacgaacaatcagaagaagaggcaaaccagatgcggcaagcattactcatgttagacctgtcagacagtctacgtacgctagaccagatactcgacaaaagaaaagatgctatcaaaatccacaatgagatgtttcctttcggacttttcacagagttgagcggagcttaccaattcgaaaacatgtccaccatcctaaaagcccttgcgacactgacccgtctgaactacaacatcagatcccaagactatcgcgcaggtcttgcaaacgtatgtcagctcaccggtctgatggggcgttggcagaaagtacacagctatccggatattatctgtgacacgggacataatgttgatggaatcgaatatatccatgtacagctcaatgccattcacaaaaccttcgatcaggagatccattttgtattcggcatggtcaatgacaaagacatccggggggttctgcgagcattgccgaaatatgccacctattattttaccaaagcaagcgttaaacgcgcgcttccggaaaatgaactactggcattggcagaagaagccggattgaaaggtaccacctaccccactgttgtagaagctgtacaggcggcaaaaaagaactgcccccccaaagatctgatctttgtaggaggcagcagtttcattgtcgcagatttgttagcgaaccgcgatacactcaatctctactaacgcatcctttggcagagcttttacggcaaccgccgaacgtgccggaaaggctccgtcaaaatacgtggcatacacaccattcatccctgcaaacagggacatatcctgaagaaagacagtggttttgacaatgtttcccattgtcaatcctgcttcttcaagaatgtgtttgatattctccaacgactggcgtgcctgtccttctatgccctccgccatctgtcccgtagcggcatcaataggcaactgaccggacacaaataccataccattggcttctatcgcctgactataagggccgatagcccccggagctttctcattgcaaattacttttttcatatatatttcctttttctgtttactgaatttcaaagataaaaataaatttcgagtaagattgacaaatctgtttctttttattatcttagcagctgatgagcaaacataattacgacatattcataagttaccgtaaaagatgttcgggcgacaagcctgaaatgctacaactgatgctggaagaatccggattccgcaaaagggtgagctttgataaagacaatttaaacggtcggtttgatgttgagttgattcgccgtattgatgagtgcaaagacttcattatgtttatggtgccggagacgtttacaacgatccgcccgctcaatgaagaagcggtcgagacaggcgaaaaagcaacatgggacatggaagaagtggctttctacgaacggatggcatccttgacctatgaagagtttgaaacggaaattaagcagatcagccataccggagaaatcgattttgtccggatagaattaggccgtgcgttacaccgccggagtagaaaccccaaacagataaatatcattccgattgctccgcaggaaagtgaaagctatgatttcgccaccctgcaactaccaccggacattagcggattaaaagattttcaagctgtattttacagtaactcacgagtagcccgattcaaagatataaagggtgacttcctgaaacaaatgttatcaaaaccttcttatgtatctgccaaatggcttgtgatgactttcattgctctatcattaatagtagcaggaagcaaaacttatacttccatccaaagaacggcagaacaaaaactggaattcaaggattgccgcacttatgacgattatagtagtttcataaagaaacacccggacagttctttgaaatctacatgcgactccatcctgcatgaattcaatgcactccggaatgacggacgcgcttccgtaaacaacaccggaaacagggatataaaagacagagagaaagaatgggtagacgtaaaatggaatcccacaatcacactgccccagctccgctccctggtggacatgatgaataatatgctgctgattccggccaaaaacaaagaattcatcatggggaaaactatgggaaaaggatatgactcaccgcagcacaccgttgtattaagttccgattattatatgtgtaaatacgaagtaacacgttcgttgtggtatgccattatgaatgactccattgttacggaagaaggcatgctgcctatgacacatataacgtggaatgatgcagaggccttcaccaagaaactgaacaagctcacaggtttacctttttccctccctacggaggcgcaatgggagtatgcagccgccggaggcgaaagctatccttatgccggttcagacaacattcgtgatgtagcctactatgcctccaatgccaatgaacgcctgcatcccgttggcgagaaacgcgaaaacggattcgatttatacgacatgtcaggcaacgccgccgaatggtgtacagactggatgagccggtatgaaaatacacgggtcacagatccccaaggtccggcagagaatcccggacaccataaaaagatagtgagaggaggcagctacctggccaacgaacgtgatatggacattcgccatcgtagcgtacagacttacgatacatcagaaccacatatcggatttcgtgtggtacttaatcctattcaataacactatgaatgcagaataaaaatgagcaggaaaactattttcagagtattcatcctcctgtttttttccatcggagggcaaatgagtgccaatgcacagacaacgacaccctttgaaacggtgttcgacgcctgtaagaaagcatgtgaagcattggacggcggctttgccagtggcgaacaactgctggcagtaagcaaaacgctgcgtgatgcagcccctatcccattaaccgtcaaacaaaccaagggcgatgtcttgagcctgaaaggacatctggtatttgactacgaattcattcaagcctgcgttgataatgaaacaatctatgaaattgcggacaagtatgcagcagaagcgaggacgagaggcgataaggactccgccaacaaagtaagattagataccaaaatggtggctgccggtcagacctgtactttcgagattccgagctgttcgggaacctcgcagataggctgtgtggcagaggtgaatcgctctttcagttggaaaataaagacaatcggttatcaatcgaaaagtgaacgggaatacaaatgtaatgacagcgtccggaaaggtcttcccttccgaaaagaaaaggttagctcggatgaacgatataaaatcatcgtctcgatcaccaataaaagcaagagagacgggagctttgccttgatcttattttaatccactaaaatctctattatatgcgacaattcattctatctctattagcctgtctatgtctgacagcctactcacagactacaagccaagccgacctactagttgaagaagctcaaaaactagaaagtaaacaagattacccaaccgccattaccaaactgaaacaagcggacgaattatatgtcaaaacgggaaagacacagagtgcggaacgtgctacctgcctgcacattctcggccgctgttatctgaatctggaacgtcccgaaggactaacctatacacaaatggcagcagatatgcgcaagaccatactgggcgaaacaaatatcaaatacatttcctccctgaacaacacaggactctactacctgactgttgcaaaagactatcctaaagcagcagaaattcatggcaagacatgggaactgtgcagtcgcattcagccccgtcctgaacaggcattcatgtttcatatcaatctcgcccgctgctacatagctttaggagaaatggacaaagcaagtgccatcgtagaagaggaaatagccatcagtaaaaagatgtatggcgaaaagtccctttcagttgcccgtcaactccagcagataggttcgttgtactacctgtcgggacgtaaagatgtaggagtcacttattatgagcaggccttcaacatctttcctgacgattcaaaagaatacgagcaacttctcgattggatatcatccatctacgtggaactgaacaatcagccgaaagtattagaatacatgaaattggtagaagctcacaataaaaaagaattggaaaagccttgcgacgaacctgattgcctgaccgagcgtgcccagtattttgccagcataggtgacaacgataaggcaagggcacattttctggatgctttaaagaaatgcgatgtgaatactgataaggagattgtttttaaagtacgccacaactatgcgcaatttctttccggaatacaagatcacgcatctgccggcgaatactacgaactggcagcagacatccttcgcaacaatcctgccgaacaggctaaatttgcattggaatcttatctgggcggactcaattatagcattgccgccaagtatgaggcctccaatcgtatgctcaaccaggcactgtcggtttatgcacagatgttgccggacagactggacaaatatgtagacgcctccgttgcattgtgccgtaactacggattcaccaaggagtacggaaaagccctcgaaatactcacaaaagccgaaaaactgcttccgacgggtgataagtcagataagatgggggaaattctgcgttccagaggcagtatcttataccgacaaaaacaatatgcagaagcagcagcaaactaccaacaggctgcagacatttacaaaattcttcccggcagtgatgtaaaatatcaggatgcacttagcagtctgaatcgttgccacaccatgatgggcaatgagacagcagccaggcagacagaacaggatgccgaacgtcaacgaatggcggttttaaacaggctattgaaagagaatcttgaacaattggacgcttatcgcctgcaatggggagaagacggtttgatgtatgtctccgcattagggactatcgctgacatctactatacccaaggacagaccgacaaggcattagcctatatggaacctttcctctccggcgaaacaaccgcgctgcgtaatcttttccgtctctcgaaagccgatgaacgcctggcattctggaaggatatccgttcctcactggacagtattcccctccgtgcagccaatatcgccgcaacaggtacacctgaacaaaaacaacgttttgcccggttaggttacgatgcattattgttttcgaaaggtattatgctcaattcgtctattgaactggagtctctgatccgcgcttcgggagataaatccctgctcggccaatacaacaaggctacccttatggcggaacaaattttatccatgcaaagtgaactcccgaatgcaaccaatcagacggaagcacggaaaaatatcatccgccagaaagaggagtatgaacagttgcaactggacttgatgcgaaaatctactgatttcggcgactatacccgttatctttctgtcaaatggcaagacgtacaaaagcatctacatggaaactccatcgccatagaatttgctctcatagacgatgaactactagctccggacaaacacctggccgctttcgtacttcgtccgggcgacacgtctcccaccgcaatcaagttaatgagtcagaaattgctatcgaaagagatgcaatcgcctacggctttcaccacaaccgaaaacggggcacatttctggaaagcgctggatgaatatatcagcaaagcggatactatttatttttcacctgacgggatacttcatcagttacctgtagaatatcttccgtatggagcgggtaacctgccgttagcattccagaaagccgtctatcgtttatcgtcaacaaaagaaatcgcactcgacaaagcttcactgaactactcatcagccgcacttttcggaggattagactacgaaatggcttcaaccaaagttcgcaatattgtttctacagatcataactccgggaaattccgtaacggacagaatgggtatcatgagttaccatatacgctcaatgaagtaaataacgtaaattccctattgaaagaaaagaagattaaaaccaatctattcgtaggtgaaaacggaacggaaaagcagttccgggcactcgacggcaaagctgtttcgttgattcacatagctactcacggagactataaagaattgaagcaacgtgaagccgatgatgcgatgaagcattgcttcctgattatgtccggcgccaatgccacggaagagaataacgacggactgctccgtgcagatgaaatcagtacactaaacctccgcggttgtcgtatggttgttctttctgcctgcaacaccggtcaaggtactcttggtgcggatggtcttttcggtcttcaacgaggctttaagaatgcaggagtacaaaccatcctcatgacactttcagctgttgacgaccaggcctccatgcttctcatgactaaattctatgagaacatcatttcaggattatccgaacgacaggctcttatcaaagcacaacagtaccttcgtgagaacggatatgcagacagtaaatattgggcaccatttatcttgttggatgcaggcagatcgcctattcctcatccttcgaaatcttgaaccctagtttcataatcagtttcaaggtttccaccgaagaatttctgtcgtacaccttttcttcttcaggtaattcttcatacggaaccaggcacggatgctgcttcaacacatcatcccgcttttttccatacgtccaaccttgttctattctggttttcgaccagacttcatgaacattcttagccatctcttctaccaaatattccaactccttcgggagttggatatgtcctgtatccaccggattgggaatatactctttcattttatgattcattatttatatattagcggaacaatttccaatctatctttttaccacaatgactgcaatagatttggtccataaaaatagacgcaccacattcacagactttggcatcaccttcattcttcaattttctcatcagctcattatgaagagccgtatcgccctgtttgataatactataccccagctttttcatcagcttgatcgtatcaaacgccatacgtcgatcatattctttttccgaataaggaagcatggaataaggcaccatgtccggagtctctttcttctcgtcatccctctgcggtccataagtccatccctcttcctggcgctggtcggcccagacttcgtgcgcattttcagcaatggcttcacgcaattcaatcaaatcagtgctcaattcaacatcttccagatcaataggccgcggattataatccagatcaggcactttcaccctcgcaagatacgcttttgcatcattccatgccgcaataaagtgatccttgggataggccgtactttcctctcctgttgcaggatcataaagcatcacttcctcttcatttacgtcaagcactactgctgcatgataagcaatttcctcctcactatttcccggcaaccggcaactatttaccacaacaatcgcatcatgtccggccttgagggcacgtatgacactgtcaatactggaaccataactgcgcatcacaatcaatccgtgttgttcgagcaggcggcctacactatgcaaaggagttcccctctccctcaaccaactgttattcctggcctcctccgagagttcgtccgaattatattcaatctttctacgtttcaaaataaactgttcacactggaaatcacaaagattaccttccgatttggctgccatctgcgccattggcaggaagtccgtttcttcatcatcagctcccatcatggcatccaactgttgagacaagataaattcctcttgcaaactttcatcagtcgccagatattcaagtaccaaagctgtttcttcagcattcgtcttaccttcttcaaaagcagccaacaattcttcggttatcatatttttatcttttgttttcatacttcttcttatcattcatagctaagtgagccaatgctgccagcgcacgctttttaatattgtacagattagcaacagttattcccatagataatgctaaaaatccaggttcgacctctttgagtactaattccctgatgaccatcacataccgcttattcgacatcagatcgaacaaacgttccaaatcaatctttgcggctattttcgattcagagtcgtctatttcttcttcatgattctgctcataaagaggctctttactctcgtcttctatcatctgttcacgttttttctgttcccggaaaaaacggattgccacaatcttaatccatgttccaatggtgctacgtccctcaaaattacgaagaacggcagcatcattcttcattagatgatagtagagttcgctgatacattcatcgtaatcaacctggtaatcaaatatcagcttaattacattgataaacaacggacgatattttatgttgaaaaaccaatcggtgattttttcatcccgattgattaatccgtcgactatttcctgatctgtcatatagttagttctttttcaatctaaaacttagctcaaccacacactggtcataagggatggtttccggatatttacttcttaaaatatcattatcgacgatgcatttatgcttcttctgctgaaagtctttatctccgtcacacgttacaaatccttgcagttccatacatgcattccaacgcaaatgttcgcacttactcaaattatcaaataatgtactggaaacaacgtcacaaaccttagaatagttcaatgtatgggcatcacgctgcgtcagctcaaccatctctttcaatctttccttattatctttgccatcctctcccatggccccagctaaaaactttttggtatcaatatgccatacattagccctatcctgctcttcctgataagccaatttaatttgtgcatccaagctatgcttgtcctgcaatgcctctctacgcgcattccattcttcttccgctgtttgcttcaggctttccttcgctttcttcttctcttcaatttccttctcattcgtttcaggcattgcgtcaatcataattttctgatatgcataataaaattcctttgccaatacttcaagcacatctgtcgataccacatcgtacgagaatatttcttcctgcgctccaaaagttatgattacatcccgggtattgccataaatattaaaatactcttttatttgcttcagctgaatggtgttgcaacttccattgacgcgcagataaatcctaaaatcattgaaacaatcctttctatatcgataggcatattcgtagagatcaatcgccaatgccatcccttcattatcatttcctatagcaattacaacatagtttagatcatgaatgatttcagaaaatttttcccaaaaacgttcggaatggatagacatttcttcacaccattccaactcatttttcctctccttcaaggcaggtgctttcattaaaaaatcacctttcaattcatctatatgttcatcaaccacatatattttttgagggttcctattgccatttacatcgatcaatgccccaaactcatatagaaaacgaaatgcatcacgtccggtttctccaaagccaataatcatcgacgtaaaaggtttctttacacaagccttcgatgtatcgacatctacaaaattcacggggtgattcctcacattcttttttaattgcaatacagcaagattagacgagtcgatgatatgaatctgatgtttcaacccatcacatatttccaacttctggttctggttgttcttacgcgcatggcaataaatctgaacctgattatggactctatcttctttacatttcgctatttccttaaaaacagacaccgcctccagattcagttcttcattgggagacaagaaatagaaagttgcctgcgggtacttcttgattaggtttcccaatctcctcaatccgagatatttgtataaatcaaattccgatttgactttatctataacccggcctgtgattccaaatttagagttaaccagtatgccgtcaagctcttctatcttttctatgaatttttcagttccgtcatgagacgaattaaagaaatgactgaatgtgaaccggccatgagaactgctttcattagcagaaagcaacctcacgaaaatgaacttacaattctcccatccttcttcattcttcccctttggctctgccgctttttttcttatactgttagccagcaatatcgcattatcattgacaccccagaaaataaacagccggcatttcttctttcttgaaagattcgccatacataaccgcacccatgagatgaatctgaatcctaacagtttgatgataaaaaccgcactcactataacggccaggaaatgtatcacagaaaatatcgtcatgtagaaaggatcatgatgcagatcttcaggaacctccaaaagatcggaatgcgaagcgaacatttccatagaagacagagcagacctaaacgccaacgctatcgaattactgtcactccctccctcattaaaagcgtaccaatatatcaggaaacctgcaataaatactgtacctgcaatccatttcaggttatccactaagaatttccgcttcttaaaaagcaggtatactaaacctatcccgataatgattaacaaaagggtagaatatccccattgatttaaaaaacaagggtctgtcgcgtgctgtgcattgcattcaccagtttgagagattactgtgcttaacatatacatattcgatagattgattatttattctacaaatttatacaaaatattgaataacaaacagattagtaacaaaaaacctcctgcaaaacgaattttgcaagaggctttcttatttcttctttaataagattattcagctttttctttattctcctccgctggagcttctgcaggtgcgggagcatcctccaccggcttgtcaactttcacctcttctcttgaaacgtttacagtcacatttacagaagcaggctgtgcctgatatggcatacggtttttcggatctgctccgtaaggattaggacctaccgtaccatctgcaaacaacatatacaatgcaaaaatccaaccaatgataggcacacagcacaacaaaatcagccaaccggatttgtttaagtcgtgcagacgtttcacaccctgtgccaaagagaaccaaatggaagcaatcatagcagcaagaccgatcaataaaccaaatactgatccaccggccgatccgctggcagcacccaaaataaatgtacctacaccaagtgcccatgcaatactggaaactataccaccgataatgcccgacaggaaatattcaattctacgaatacgcccgtcaaatgagaaaggagctttgaacataatttattaaatttatatgaataaataagtgagtttttatccgtgtttctcaatatgaaagcaaagatataaaaaaaattaaataaagaaagaaatcgggcaaaaagattgaaaaaatgccctattttctgtagaaatcacaatttcactccatcccaatgcatcactgccacccattctgtcggctgacaagttccgcaagaacgatgcggaaccgtagcgaccaccaagtcacaatgggaagacagtacgattcttaactccttcagcaacatatccagctgaataatcaaatgaagatatttcgtcatacaccggatcacccgtacatactgataaatgcacatatcctctccccgccttatctcccctaatgttttaggagagatagcgaattcgcttatgaaaaaactgttactgaaaatacgatccatatccattaaagccaataccaaattgcttaaaaactcataaggttcctgtttttcttttgccatgtcattctatgattaataaattataatatttcattttttatttgctttatcaagtgctatccacatagggaagcaaccctatttttaatatcccgacctttgttcccgttatctgatagtcaggtagctcaatcttacaaaaacaattttatatgaaagttttagaagaaatcaaagtctcggtttacgaaaatgtgtattcaaaaaagccccgagtcatgtctttccttgaagtcattattatgtgcattcatccgatctatgcctccatcataaacgctattcggcggtactatgcagaaggagaccatgccgcggcacagaagctgaaaaaccaactcccctgcttcactccggcaggcacattcgacggagcgcacgctatcaaaaactttcttctccccagccatattgtcggacttgattacgatcatgtaaaagatcgtcttcaagtcatccaacgttgtgcggcagatccccacacagtagcggcaatagaaagccctaccgacggagtgaaagttttcgcctatgtagaaggtatcgaaaaccgccatcgtgaagggcagcaactagtgagccgctactacaatcaactgctgggattggagagtgacccggcatgcaaggacgaaagtcgcatgtgttatttcagttattcccccaacggatatgttgcggcgctctatcaggcatttgtgttggagccacttataaaagaagaaacaaacactttctctgaaaatgaagtgcttcctccctttccccttcaggataatactccggaaaacgtgtctgaagaagaaatcgcccaatttatttcgtcctatattttctttcatccgctaacagccggtcagcgccattccaacgtcttcaaacttgcctgcgaagcctgccgccgacactatccccagaaaagcatattacgcgaacttactgtatttttcgagcacacggattttcgtcccgaagaactaacaaaggttttatcgtctggatataaacaagttaatgaacatgcacccgcttcctctccggccagcgccccttcttttcaaaaggacataaggacaaaaagacaatatagtactgcagaaaattccgataccgacgacgaagcctattggctgggagaagaattccgaaaaggaactcctttatttccccgcagtttgtacaataatcttcccgacctattaaatgactgtatcattgaagacggaagcgaacgcgaacaagatgtcgctctcctttccgatctcacggccttgagcgcagcacttccgcagactttcggaatttataatcataaaaaatactccacgcatatattcagtgtcatactttcgcctgccgccagtggtaaaagcatcgcccaaaccggacgatacctgttggaagaaatacattcagaaatcctgtctaccagtgaatctatgatgaaaaactaccaaactgtacataataactggcaatcagaatatcaaaaacagaaaaagaaaggagaagcatgctccgaagaaccgcaacgacctcctttcaaaatgctattcattcctgctactaccagctatacccgcatgcaaatgcagatgcaggacaacggtccacagggaagtatcattttcgacacggaggcacaaacgctatccacagccaatcatctggattgtggcaatttcgacgatatgctccgcaaggcttttgagcacgaaaatatagattcttcctacaaagccaacggcctcattccgatctatatacgccatcccaaattggctttgttgctgacgggtactcccggacaaatagacggcctattgagcagctacgaaaacggattgcccagccgcaccctgatttacactttccgcgaagctccgcactggaaagaaatgggcgacgactgcgtctcactggaagattctttcaaaccgattgcgcatcgtgtctccgaattatatcacttctgtctggctcatccggttctttttcatttcaaccgcctgcaatggaaccgtctgaatgagattttctcacgtatgctgtccgaggtggcattggaaggcaacgatgacctccaagccgtagtgaaacgctatgcttttctggtgatgcgtatcagtatgatccagacccgtatccggcaatttgaagcaaccgatctttctcccgagatttattgcacggacgctgattttgagcgttctcttcaaatcgttctatgttgttacgagcatagccggttgttgcactcatccatgccgtctccttcggtccgtccactgaagaatccggacactattcgtaattttgttcaagagttgcccgacagtttcacgacagatgaagcgattcagattggcgcaaaatacgatttcaaccatcgtaaggtaacacgtctgctaaaatcgcttaatggagtaaagatcaataagatatcccatggttcctataccaagatgaatgagcaatagtcacatctgtcctttttgtccttttgtccttttggagggcccggaaaaacatcgggagatttgaaaaaaacatctcaatgattgaaatcaaacattgggaagtttcgatacaaatctcccgatgttttttctttttatctgtgcgcctgtgtgcgtcattatgcgtcatgccgctttcccgatgtagtacttttgtcatgtaatcgattacaaggcaattaaacaattaaaaattaatgatttaaaattaaaagttatggcacagaattacactctcatggctcgtaagaacctgttgaaacctagtgaaactccgaaattttatgcagtggcgcgtagcggtcgtaaagtgacggtcaaggaagtttgtaaacgtatcactgaacgctcttcttattccaaaggggaactggaaggttgtatcggtgagtttttgctcgaaatcgtcaatgtactggatgaaggaaatatcgtccagatgggtgacctgggtaatttccgtatgagtatcaagaccggtactcctaccgatacggcaaaggaattcaaggcatcatgcattgataagggcaaagtgctcttctatccgggtagtgatctccgcaagttgtgtaagacattggattatacattgtataaaagtgattcttccactgattcggataaagatccgcttcctgatgatggcggtgatgataatcagggaggttccggcagcggggaagctccggacccggcagcttaatcaaccggttgttgactggttcttgagttcataatgtatcagtagtatttattctttaattcaaatttatatgaaaaagcaactttggaaaaacattctccagtttattgtaactatcgcgacttcgatcatttcggctatcggtgtaacgtcctgcgtgggacattaatctcctgctgaccgatatggaaaattcagaagaaaactatctcccacgtgagattaagttgttggtgattcattgcagcgcgacgcgctgcaatgtttccttcaccgtagagcagcttcgacaatgtcacctgcaacgaggtttcaaggacatagggtatcatttttacatcacccgtaatggggaacttcaccattgtcgcccggtatcagagcccggtgcacattgccgcggtttcaaccggcatagtattggaatttgctatgaaggcgggttggatgaagcaggtcgtccggcggatacaagaacacaggcgcagcgcttcgcgctacttgacttgttgacgattctcaaacatcaatatccggatgcgcaaatcctgggacattatcagcttagtgcttcgattcataaggcttgcccctgttttgacagtcgaaaagagtatatgaatatataaaaagaactacgggagctcgcgaaagtgcagtctcccgtagttcttttttatgtttatatcatttacagttcccccggctttcccaagtaataggtaataagccgcacttctctcacagaaaatgcctttgtcttcggatgaaagtcagtagatagtatttcattcatcaacggcttgcatctcctcatccacctccgaagtttattgaccgaagcacgaatcgtcagatcaggaaaatacatctgggctaactcttgtttattataacatttcactacaaagtctgaatgttccattgtttctttattactgttttctatgctataaagttacaaatatttcaacatataaacaaagaaaactgatattattatccagtataatgagagtaaaaaatatcaacgatcttcacagacagttgatatagtgggaaattcacatcggctttaacctccgatgtcagggcgtagatcagaaatgtaccgtcgtacgatttccaatccacaatgtaggagaatcatgcccttacagcatgaagctagggacctacatttttttcatctcacatacgaaacactcacgtgtttattacatctcaacattttattttataccatttcttatttttatacacatcaattatatcacctaatcactcataacaattcttttaataaccgcttgttccatttttttcgttcgctatcaaatacccatccccatttattgaaatatttaatcgcattccgaatatgaattataagcatctttttacttttatatgaagcagcacgatgagcatgaacaatagtaacccctggccaaaacattgttcgataatacttatgtattcttcgagtaagatcaatatcttcaagatacataaagaatcgttcatcaaacaaaccagtcttattgaaacattcaatacggaaaaacataaaacttccttgatgatgagggatattcatagcctgtgtatgatcattaaacttaagtatatatcgattatttcttttttctatcattttctttggtagaaatcgacggaaaataagatcaactggtgttggcaataatctacaggtatattgcattcttccatcgggatatataatattaggttgtacttgagctacatcttcatttaaatccatataatcagccaactgctccaacacactcgggtcaaaatagacatctgagtttagtatcaaatgatatttactctttgacttcaaaaccttacgcaaagcttgattgtgtcctgcaccataccccacatttctactgccgatatattctacattagcatattctttacaaaaatcggcaatatactgctggcttgaattatcaattatatacactttagatatcaagggagaaagcaaagaagttaagcacttagcaagttctaccaagtctgttttataagttacaatagaaactgttatcattaaaaataatataagaaattgttattagctcgacattatttaaataaatagacagctctccccagagctttctatcctctcctaaccatctcaataaatattaaagagaataattataccaaagcataaacatagcaatgtttgtaaaatatttctaccagctggtgccatgaggctcaacaactataattttatatcaaatacacttagcatcaatgtacagagtttaaagccaacaaagtgtaaagctataatataaaatgactccttaccacgcccatgccttacctactgttccattttctatcccatactccatatattttctaccataatcagccactgcatcataaaaaacaatattcagccacacattttgtaacaatactactagaatatgaaagtacaacaacaattgataaaagcgattcatcttccctttgataaatctgacaggggaaaatcgtttttctgcttttaagaaaaaacacctacaacgaaaaataccgaaacgatcactatacctttaatgatatatacctagcagaaatgagtagactttaacttattcacgattctgtaattatttcattatatacttgtactagattctttatatgagatatcaagctccaatcgtctgcaataaaattatttacaatattattttgcattacttggatatcagcattctcatatttgacaagcacctcttttaaagaatccaaatttcctgttttgaataaataacctgtttctccatcaataacctgttcacttgcagcacaagaatctggaactatacaaggaattccataagacctagcttccgccacagataaaccaaacgtttcataacataacgaagtgaagaccaaagcttttgcttttttaaagtaggcttgtttatctttacctgcaacccacccaacaaattgtatattaggatatttttccattaattcgcttctcaaatatccctcacccaatactattcctttccgattcaaatccgttacagcttgacaaaacagcccaattcctttctcaggagataatctgcccataaacaaataaacatcgttatttaataatttattaggtaattgattctcatttatttctacaggatctgcaatcgtatatattttacgactatcattcatcagctgcatacaaatctttcgagtcaacgccgagattgatatgaaatatattttcttattttttgccattacatgattctgaatcgccattcttatacttcgccatattttctgcggatagcttcggacatcgcagttacaagtcaaacatgaataactcatcggtttcctaaagcaaatctcattacgttgataatcataaaaccctccattgggacaaaagcaaaaaaaatcatgaagtgttatcaccgtcttaaaatccattttggctgtaacagcgtagagcgaagcggttaacgcttttgtccacgtatgaaaatgtataatagactctacgggactcaacgtagctaaaaggcgttcaaacactcgctttgtttcgttatcccacaatcccttagatattgcacgaatccgattctcatcatgcaatatgtcctttttcccaatacatataacgcgcacgccgacctcctccaacctcctatcaataggctgaacggcagaaaatagatatacagaataatgtttcgctaacccaatagcagaatttatggcaacacttgcagcccctccctctatatgtgcacaatcattaacaattactatatttttaagcatctatatttttttgaaacagtttattttgtaaggagaaataaaataataaacaatatgaaagaaagctgtcccatagagcatataatgaccgccttttatcaaataagaaataaaaaatacaataagacagaggcttataatattatccttattataataccttattagaaaaaaagcataaagacaaagtcctaacactccaaattcagaatacagccgggcaaacatcgaataagcatcatctttattcaatccatatccaccaaagtctgatttatacatacgctcataattctgggcgtgtgtacccaaccctgtacccaaaatgcgacagggagcattgaaagcaatccaataattagtcaatatcacatacgaactcgtatttaagtgctcaaaatcttcaggctccgcatattcaaccatagataaggtttgtgttatcttctcttgaatagctcttaattgtggattcacgaaatattcagaagatgataaaatatccctattattaatacaccaacacacacccacaatgaaacataccacaagaccaattcttaaatatttaaaatagtagtagaacttaagaaataggataatcacaactgcaacaatcatactggtggtcaatgtcagtattaaagcgatcccaatgactagagacttcattcgattatatttcataaatcccggagccaaaaaaacatatgcagcggctggtatagaaaaagcagtgaaagatcctggttccattaacattgcatgcaacctacccgtattctgtgtcatcgtgccatctaatgtataaggaaagatatctatttgagtcgctgacataatgacaaattgaacaatgcctataatggacaaaatataaactaaactcacatatctacggaaccattcagaaacaggtatctgacaataccgaaaaatctgataataacaaaacacacaagtaaacaatagcacaatctgctgaaatagttttccagtatcatagccattatacacaaccattgacaatgaatgaaagaaaaaaagagtgcctacaaacaaacaagaagtacttacatatactttattaagttggagcattataaataaagttgctattattagaaatgcgggttcagtatatcgacctagaaccattcctgccaacacaaaccaaacaagcgataatttcaatgtgatagaaagacgcattttcatattaaacacaaggctaaatgcattcgtaaataattctggattaaagattgttttcttccattattttcctgaatctctttgaccaagtgctccaatttagtctttcattaaaaagcgttattcctcccttatgtaattgaagaaattcatttgattccaagctcttttcaatagcatccgcaaactcctgttcgcgtgctgctagaggaagtttataaccatttacaccatctattacataattccctgtccctcccgtatcataagtaaaaataggcaaaccgaatgcagaggactcactaaaaacaatagcagaacattccgcattagttggtaataaaagtaaatgagagttcttcactatatctacatactttcggtaatgctccggattattcttatccagaaatcccattattcgaacaaatggaagattcgcatattttagaggtatttcggaaagccctacaatgaacagacaagagttaatcccacgcttatttaaaagttgcaccgttttaacagcaacttcccctcctttacgaatccagtctacacctgaaaataagatattcaaagctccacttttataaggagtagcatgcaaaagatccttgtcatcaaagtttgctccaaactcaagaacataatttctctggagacacccatcgtaatcgttgataacagaagctgctgcccattgagaagaacgaatattaataaacgcattcttaatcgcttctttttcatagtgttccccttgagtaatcaaccatgaggacaaaccatgccaataataatctatcataatatgaaaggttgcatctgtataataaattatcggtttctcaaaattaacaaaagcactaatttgcgccccaccaggaaagaaaatatagtcgcacaatcgtactttattcatatttatatgtttggcgcaaagcttaaaataataccgattatgttctactatggcttttttcccaaaaagcattttaagtaatattttcaaaaatataaaacatattttacttggtttacaagaaatccataccacttcataaccagcattttggagagcttcccttattttatatttcgtaccactccatgcctttttgtctcggaaagggtcttcagcagaaacgtatcctattattttatttctcatcactaatatatcttaattaattatcttaattttccgcatgtaatatccaatgacaccttttgtcaaataatatacattcaacaaaagaggaattgacttacaataacgcttaactttaaaactctcccaaagccctctgattgtattactaactcctcccacttgcatggctatagtaggtgtttcaatatacctagcattcaatttcttacgaagcaaaaattcgtaatctgcacaaattttaaatgagatatcaaaattccccaattcatcaaataactttctattatgtaatgtcgaaccatgagaaattttcatacaacatcgaaattcttttatattatatggattcccgaatactctcttatatttccctttagcatcaattaatttactttgcgccgttattatatcgataccatccaaagtctgcttttttagataattccaatatacattcatagcaccttccaataaatagtcatcagcacccaaaaacataatccattcccccgtagccaaacggatgcccttattccacgcatcataaatccctttatctacttccgaaacaataacatcaatactctctgcaaactctctgacaatatccattgtccgatctgtagagcatccatcgataattaataattccaactggtcttttttttgagaaacaatgctattcaagcagcgcttaagagtcttttctgcattatatgtagcaattataattgatattatctttttcatagaattaacaatcccaatagtgtacaggaatagagcattatacaatctttttcttacatacaaattttatgattctatttaaccttttctaaaacgtctctaatcacatctaaaaattgagtcccatattttaaatctggttccaaataatttccttccccccattcattccaagcttttatgaaaaccagattgtcctctgcagaacgcacagatacttttgaaaacatctcatgacaaagtttcttccatttttggggagtactattaacgattatagttccacgaaatttgcttcgcggtgaatgatcatagttagggcatatagaaggataaacattctcattaactatgtaattatttaataaatattgagaatattgactatactcaatcgttattggtttccttaataatttccttaatattttttttatatatatattcggaagagttccacttttttcactagctccaaatacaaaatccaccaatacactatcaaagcctaccttaaggatttcttgcttcaagctatccttaatagtaaatcccataaaatagaaaccttccaatccattttctctagccaaccgattccatgtctcaataaataattgcggttctgggatattcaatggatcatagacggcaaatagtattttttcatttattctaatataacgcctatctttaaatgcaggcaacatggcgtagaagtgttcttcataatcttcaatacctggataagtttgttctatcaataatttagaaggcttattagggtcccatgtctttgcataccatgaatgattagcccagcataagcaaaaaggaaaatcaggcttacctgtttctactacttctccaaaaactctatctagcattcgtttaccggcaaaccaataatgccagtagcaaaacccttcaatgccagcattctttgccatttccgcttgttgaattcgaacttctggaactcttaaatcataatatcccaaatctgcaggaacacgaggctgataatgccctttaaatagaggcttcgccctacctacatttgtccactccgtaaatccttttccccaccattcatcattttctttcgtagggtaatattgtggaagataaaatgcgatcaatcttggttttgacataatatactactgtttattctttatatattcataattactttgttgcaaacgaagcaaggtgctgtagttgtccgtccttcatgcgatctttttcactataaagaattccctcatgctgctttacttgttctatagtgaatcttatattcaacacatgtgctggaattcctcctgaaacacaataaggtggtattgatctagttacaactgcaccagcagctatcacggctccacgacctactgtaacaccctttagaatcgtaacatttgcaccaatccacacatcatcttctattatgatatcagcatcatcacttgcctctttttcattattatcaattattggaactcctattttcctcatattatgatccccattcaccatagtaacattagggcctaaaagaacattatttccaaaaattatttttttataaatacaatacaaaacagcattaggaccaatagatacatgattgcctaattcaatcatagatgccgaattgattatacaaattcgagcctataaaacatttatctcctctcttagcaaatttatattctggacgaaatatgtaagcgattagctttttaataatatttttcagcatgatgtaactattttaaatcaaacagaatatttatcctcggctacctgtaaataataatagtagccgtggagaaagaatacgcaatattaagaatgataataaagatattattaacgtcaaaaagatgcacgcaaaataaattaaaactactgttatttcactttctggttgtatcataaatactacacatgatgttaaaggagcaacataaatccaatgaagacaatatgtaaaaaaagaacttgcagttagtatctttggaacattcatttcatgtttatcaatatataagaataatgcagagaccaaagatagccctaataagatacttaatctaattggaaagttatatgctaattcatcatattcccaaacagcccataataacgaaattatataaacaggccaatatcctgtaagtgatgccatttttctaaagggctctatccctttcatggcaaaatatgctccccatgtaacaaatagtataatatctataccaggcacaataggcaatctaggccacaaacctaataaccagataaaagtcaaaactataacaacatatttaccacatttatttatcacaaaaaaaatgataggagccaacaccataacagccatcaaatcacgaacataccaaagaggtgcatcagaaggagcatacataccccaaaatgaattaaaaatctctttgcacaataagaaaaaacttttagggagaagttccaacttatcagacgatatcataaaaagtctccaaatttcaaatataatattccataataaataaggtatcaataacgtttttactcttgattttaattttaatttatacttttccttaaaacaatcaacagtattcaatccttgaaaaaataaatagccagatatgatacaaaacatagggaccgccacacgaggaaatatccaattaaagaaataaataaacctatgagaccatgaatcggtattaaaagggaatgtatattctatgccaccttgagatgctgcaaatggtagaacatgaataaataaaactaatacagtcatcgggaaacgtaaccgctcaatagttcttgatgtaatattatccatatcaacaagattttattttatgccaccgttcaggatagaaatcttttgttacaacatttcttataaagcgttcaggacaaacagtaattgaatcttcaaatttacatagccaagctccccaccatgagaatgtactattcgcattaatatgataatgacattcactcatcaaatacatatcacgccatgaatttacaccttgattacactcaatataaaaaaaattctctactccgaattgctccttgcaccaatccaaatcattagaaaaaacatagaaatgaggagtatccacatattgccgaatataatcaattgcttcatggtagtaatccaatgtagctacaccattcaattgataataaccagtcggttctatattcatataatctccccgtcgaatatggacagaaacactactattatcaccacgaataacctgaagccattcattaaatcgatcctcattaggttgttcacggaacataaatgcttttttgacttcatcaggtacattcatgaaatttttttcggaatgccatccacccacatagtaattgatcccccaaggtcctttctgcatcaataacggcgtgtagtcataattgagaggttcatagattgttcgaacaccaacactcttgaatagtctaaattttctacttaatacatagataatttgtaaaacctttatcaacaatgttttattcacctctataccaaatgcccgttctaaatcatatccatagtgattatgctttgacatgatatcaaatattacttttgtgttaggatttactttcttcttagctaaatagtacgcatactgagacatttgatttcccaaaccattaaatataacaacaacatccattatacagtaaaattatttatattattcctatacttaccgaaccgttttacccacgctgctcttactatttttctctctgaatcatcaattcctataaaataagccgaaatagagaagatcacaaatgaagttacggtggacaggatcaaacgagtaaaagattcatctttcaatataatcctaacgcaataaacagcacataatgtaattatccctaccaaaagcataggcataacaactctacccaaaaaatgccagaaaggaaaactcatcacttttttaagatagaaatagctcataaaaaataaaagtatttctagcccgaaccccagttgcatacaaataataacattgattcccctctcacaacagagataacaaacaggcaaatacataaaattaaggagactgcctgccagctgtaaattccgaatacgtcccatcgccaaataaattgggccaaaagcacctgtaatcgcatgtataaagcttatcagtattccccaacatacaaactcctgagtgtatacaggaaacgatttcaaccatattgtaagtatataatgtgactctaataaaaatgggatcatcattacaagaacaagatacccctgtgctttagcagaagcgaaagtcaagctgatactacgtttaatatcaccttgactataagattttgttatttgtggtgatattgcaagtcctatatttgaagcaaaactactaaaaacagacatcacctgcatacagataccacgtgccgcatttactgttaagctataaaatatatttataataatattcaggccctgatcttttaaaatacctgatgctgttccaatccccatccatacagaaaaggaagtcatttgtttggatatatgtttatccagaataaaatgatattttgattctttaaaatgacgattgcaatatattccataaacaacacgagatatcacacttatcaaagccagaagaaaggcatagaaatataaacgatcaaacgaaacataaggcaaaaacaaaactacaatcaacttagcaacagattcaaatatactcattatggcataaaaattcatatgttcatgagctataatgattgcttgatacggcactgcaagaagtgtcattgagaatacaaataaagaacaataaaaaacaaagtaagccgcattcattcgctctggcggtatattgagatatgtacttattaggtatgtccccccaacaagtccaataataaatacaccaatagcaataataataagcaaatttataattgtagatattgttcttttcaaaatttcaggatttcctatacctatttcataggtaataaaacgagcagccgtacctgaaaaagttcctgtcagaatagacaacatagaaacaaagcctcctaccaaagaatagagaccaaagtcatctactccaagtatctccagcactaccctgctagtgtataggccaatagccattgataagaacaatcgtatatatagatatacggtattcttcattatacgcttattatctgcagaattatttgacattctaaagtaaaatggggctaatcatgttatttaaagtgccccaacaataaagcatttacaatcctattcttctgtaataactcgtctatgcgaataactatccacatgagagaaacacctaacaatagtctccaaaacaggttaaataaaatttaattaaatagtctttatgaaaatcgccatacacaaattgtagaactcatcattattatccttctgtatatttaagagcatatataattacttaaaagtgttcttaagtctacaaacctgtttacttgacaataatgaagcaataaataatttaaggtaaatcattgaagatgtatttctaataatttcattagccattggatgtttcatttttaataaatatggctttagatacttatcaaaatcttttctttgatctcgtggtatatatgaatagtatttatacatacgattacatacttgataaaaatcatatttaagattttcaggaagaagtcggtctcccacttcatagattgctcgaaaatcaatggcatcacgtttaacacctgaagcatagggagaagcatagggcatcattgcatataaatacgattcttttgagtacatcaatgtttttcctttagataagaagttccaatagaaaaacaagctcatataaaaacaacctttcaaagctacaggcgcttctacatttttaacggcttcagttctgtatataactgacgaaataaacgttcctaatcctagtatgttgttacataataaaaaataattacgcattgccatctcatctttaaagttcacctttaaagactctacttcttcacgaaggaaataaataggttgtaatggctttagttcaggagacatgccaatggggcttgatacaatcacatccacatcttgattttgatctaataaattgaatatcttatttagtcctccatccattaaataatcatcatcacctttaagaatagaccactctccatcagccattttcattacttgttcatgattagcatccaaaccacgattttcaccaaaataatttattttaaagttaatagtaggatattttcttttcatttcttcaatgatatctttagttccgtcagtagagccattatcagaaaaacacagctgaacatcattctctctatgttcagaaagaatttgttcaattatcttggtagttgtatctttaataaaatatacacgattataagttggttgacaaatagatagtttaaacatgtttttgttgtttataatatgagtatattaataacttaagtaatttaacaattgatttatatttatgtcaaacgtaatactgcaaggattgcttgatccatattataatatttataattagccagccgcccacatagtattagattatcataattcccagcttttgctttgtatttagaataaagcatagctgtatcatctgttggaacaggataatatggttcatccgctttaccttcctcaaacatcataggatattcataagcaatagttgtaatccctaaaatattttgtttagggagctgcttgtattctgttatacgggtatatccttcaacctgaggataagccactactggagttgcttgaaataactcctcattcaaagtctcatatttaaatgttaaagagcgatatggtaattttccaaactcataattaaaaagttcatcaatagcacctgtatatactaatttacaattagtggacacttctaaaccatggaattcaatcctatggtcttgatcattcaaagatatatatttaagtgcatcctcattgtttatatattcaatattatcgtgatccaaaaggtccttaatgaaggaagtaaaaccaccctctggcatacactcgtacttatcagagaaatacatctctttataatctaagcgaactggaactcgtttcaatacattgatatcgatttcactagctttaataccccattgctttgctgtataaagactgtaatcattatcaaaaagcatttgtgcatactgcttaataagaggctcttcactgttcaataattccacgattgttacagtactttgattaggatactttaatagcaaagcttccttaattaattcagctttatctgtagcataaaactgatctatggttttaaaattgaaaggagaaggtgtttgttgtccacacatatcaacagaacaccttaatttaaagggattccatttatgatatttagttataaatgaatatacttcctcactattagtatgaaaaatatgtggtccatactgctgaactaatatgccatacatattagtttcatcataaagattaccagctacagtggatcgcctgtctatcactagaattttagagcctttttcagccctcaatcgtgcaaatgtgcttccactcaaacctgcaccagctataatataatcaaaattacttaatcgcatttttatagtaatctattgtcaattttattccagactcaaaactataccttgctgtaaatcctgtatcttcatttaattctgatatatcaagtatctgattatcaatagttttatttttataaggtatatctccaattcctaaaggcaaggtaggatcaatcatatcacgtataatcttgacatattctactatttgtttattttcaccactcccaataggatatgtctttcctcctattcctttttcaccaacagcaactagcgcatcaattaaatcgtcaatatacaagtaatcccactgctgttcaagccctgtaaaagatggtttttcaccttttaacaatgtcttaatacaataggttatcaaattttcatcattacgaccaggaccataaatacttgtaattacagcccaaattaacgaaataccattttgtcttgcataggtttgacacaagaacttggttgctaccttggaagcactatacaaatcagaaggcgatggaatactgcgcccattaataacttcattaccacaagcatattcggatgcagaacctggaaaaattactctagaaattccattacgatgggcaaactccatcacttgtattccatacaatatatttgaaacttgaatttcgacttgatttttataagttgagctaacacccgcccaagccatatagaacattgtatcagcaccttttatctcctcaattccatcccaatcaacaatccgcgataaatcaaattcgatacagttgacattatgcaagctttttgcaaaagagtaatcacctcctttagcaactaaagcaacaactgcaatacctttggatgccagtttcttacataattccctccctaaaaagccattagcacctacaactattacttttttcatttgattaaatattgcttaatctgatcaacacacaagctatatacattctcaaatgtataccttttataccagtcaacagtaagagcaacacattgatgaatattcatacgtggttcccagcctagttgaaacttagctttactaatatcaagcattaaaaatctagcttcatgaggagcattggggatggagatatcattgagcccaccactaccataattcttgactacatcatttgccacatcccatacagaggtaatactttccgcacgaggcccgaagttccatccctcacaatattttgttggttcttcccaaatttttgcagttaaaagcatatagccactcaatggttccaatacatgctgccatggacggacagatttagtatttcgaatatcaatattcttaccggattcaagagctttaatgcaatctggaataatacgatctaatgcccaatcgcctccaccaatcacattacctgctcgaacactagcaatactcttgccatgtttatcatactggtcaggattgaagaaacttctgcgccatgaggcaatggctatctctgccgcccctttactactggaataaggatcatatcctcccatcggttcattttcacgatatccccaaatctgctctttattctcatagcatttgtccgtagttatcataataccgaccttcacactatctgttactcgtatagcctctaaaatgtttattgttcccatcacattcgtttcgtatgtttcaacaggaatatcataacttagacgcactaaaggttgagcagctaaatgaaaaacaatttcaggttggtatgtctgaaagatttctttcattcgttgactgtcacaaatatcggcacgtaagtcagctttaattttctttcctattcccgataaaacataattatctttttctgaatatggatctttcgctacaccaactacctctgcaccaagttcatgaagccaaatagaaagccaactacctttaaaaccagtatgtccagttacaagaacacgttttcctttatagaaattgttaaatatatctatactcattatttaccaaactttccaaggagctagccccttatcccacatctcattcaattctacattatcacgcagtgtatccatcggtttccaaaaaccagtatgacgataagcatgcattttaccatcttttgctaaattttcgagaggtttacgctcgaaaataacagtatcatcattttcgggaatatattctaaaatttcaggttcgcaaacaaagtaacctgcatttatccaattgcgatcaccatctggtttttcttgaaaagagagcactttgttactttccaagtcaatttgtaacgcaccaaattttcctccaggtttataagccgtcaatgaaatggcacattctgataattcatgttctttaatactctctgctatattaatatctgctaccccatcaccgtaagtaagaacgaaacgttcagcaccaatatatttctgtacccgcttcaagcgaccacctgtttgggtattcaaccctgtatcaaccatagtcactctccaatcttctgaatggttatccaaaatttcaacacaattattagataaatcaactgtcatatcactattgtgccgaaaataattggcaaaatattcttttattacatattgcttataaccgcaacaaataataaactcattaataccataatgactataagtcttcatgatatgccaaaggataggttttcctcctatttcaaccatcggcttaggaattaaattggttgcttcggacaatctagtacccaagccacctgcaaaaattacagctttcatatacaggaaaaaattataagcccctgtttctatatctacttctaaaaatatatctttaaaaatatcccatagaaaatagacaattttctataggttctctatatgctattgcaaacaggggtaagtagtattatctcaatatatttgactaatttaaattgatcatcaatcttaatacgcattcttttctccaatgaccacatttgctatagtcttataaatgatatataaatctaggaatattgtccaatgctccatataccagatatcagccttcacacgtcctcccatctgtgaaagttctttggtttcaccacgaaaaccgtgtatttgcgcccatccggtcactccaggcttaataaagtgtctaaccatatatttatcaattaaccgagcataaatctccgtatgagacaacatatgaggacgaggaccgactattgacatttcacctttaaaaacatttataaactgtggaagttcgtcaatattagaacgtcgaagaaagtctccaaaacgagttttccggggatcatcagccgttgcctgtttgctgtcagcttcatcatttactttcattgaacggaatttgtaacacacaaaatcgacgccattcaaaccggtacgcatttgtttaaaaagtataggaccgggagaagtaaactttatgatacttcccacaatgagataaacaaaaggaaaaacagtaaccagaaaaataccagataaagcaatatcgaatatccgttttaatatacggttctccatcttacctagaggttcataacgcaaattcaaaattggcatattaccaaccatactatgccagatacgacggggaaaacccttacaaacattaggaacaccatgaaaataaagtaaatggttctcacaataattcatgatagaaaagttatagcgtccttcctccattgacaaagaacaaaaaacatgcttaattcctgtgtgtacggacataaagtccgagaaaccatcaggactacccaaataaggacattgggaggaaatagtgtcattcgatttaatatcaaaataaccgactacctcataaacagaagatgccaaagaactctccatttcctcatataacatctgcatattattacctccacctataaatacagcatagcgcctatgtttacctttcgtgcaataaactatcagcaaatgacgaataataatgcggtaaatacttaaaacaagaaagagaataaaaaaataagagacaaagaaaagaggagaaaaaatagaaattccactaaaagtcataatacatgcccaaaagatagaaaaggctataatgttcttcaatacacgtaatacgagctgatctgcacgaatccccctactgtcccaaaccctcccacgagatccgaaacaagccagatagcagagagtaagagaagccatcataaaagaaacagtacaagaaaacggcaaatttataaacgctttcttccaaaagaaaaggagcagagacaaacacaggttcaggataattaggtctcccaaaactacaatagactctacaactttatttatctggttagttgatgccataacactttactaatggatatttaagcccggatttctttaaacttattcaagatatcttttcccaataaatgccagaatataacaatacaaacagacagaaatacaaatgccagcacacatatctttttgtcggttcctgaaggagtcagcggcactactgcaggctctataacagcaaacacaggcttttcctcctgaactttggctctagagacctgaagttgacttccaacttggctatatatctggtaagcaagactcatatcattctgtaaacgttcctgttcggcacgaacactttgcaaaatgatattatcatgagaatccaaataatcagcatatttcttttgggcagcataatattcctgctgacgttctttgaaaagtttctccaagtagatacagtcttctttcgccttggaagtacgatagtcaatgatgtattcctgcaactttttcacaaccgaatctgcaacaacagcagccactctgggttcttgcaaggttacggcaacggaagtcatggatgttttcttatctacagaggcaacaatcattttctttaaaacaccaatcttacccaactctttctttgataattcaattgtaccctgacttactttatcagaagatatgaattcatcctcaccttcaataaacaaagactttactccaccaattaccatagcaggaaatccaattacataactccaccaaggagaagactcctcatccagataagcattcaaggtcatcatttcatttttcaatacaggtattttcattgtggaaagttccaataagaaaggagtggaagatacaatatctgcagataaagaagcattcaaagcatcactgccatcacccatagtaacgtcacttcccaagaaagaagctgccaaaccagatagaccaccacctttagcacttcccatctccggagaaagagtcacttcaaccgtgtactgcctaggaatactgattgctataataacgccaattatcagtccgataccggctgccttataaatcttcttacgaatacccataatcctacgaagaacacccatcaaatcaatttcgatctcttcatccgtatgattattccgtttttgttttatatctttttcagatttttgttctatcaaagtagtcataaaaggaattcgttatttctttattaagttagcaatagaagcaaccatcattcccaatgtgctgaatgtagtagcgtaccctaaaatattacccatattagtccttttcttagccttactaggcacaattatctcacatcccggctcgatctgtttcttaccactacctttcactttagtcacttggccattcatataaactataaatttcttactcttctttgcattttcagaataaccaccagcctgattcagataatagtctatattctttccttccatataagaaaccgtattcgggaccattacggcaccattgatcgttactgtattattatttttcggaatagaaattacatcacccacacgcaagacaatatctgctgtacttccagggttagctaatgctttctccaagtcaataccaacactaaaggtatcttccacacgaacacctaatgagtccatcatagcttcacccaactgtcgactcatcaagcggaccacatcacccatgcgtttcttttcacttgcattggctacacgagtcaatttggcaccacgtaagtaggcataattcgttgcacctcccgctttattgattaagtccgaaagacgttcttcacgactggtcatagcataagagcctccgaacagaatttcaccttcaacaaccacattctgttgagcttgataccccggactacgacgtacataaacttcatcataaggttgaaggacaaagccaggggttccatctacaataaaaccttcttttagggagaatgtatatatctggccgatagtatcgttatctactgtactgcgaggattcttaattctacgggatacatctacacggactacagaagcggcttcacgcaagccacctgcctgaatgatcaagtcttcaagggtcatgttatcagcataaggataagaatcaggtttggctacttcaccatggattacgacgttgcctctgtcttccaggtcatgaatactaggaatataaaggatatcgtttttcatcaggatgatgttttgggaagtaccgtccatgatagctttaatgtctacaggaacaacttcggtagtcaagtcctcacgctggcggtagagaacggcacggttcaagaaggcatcaccggtcaggccttgggcttcgtttaccagttcacggacagtattcagttttccattcaactggtagatgccgggacgataaacggctccacggatttcaagtttattgatgaaacgattaaggatggcttcggcggtcacaacatcaccgtttcgcattttatagacactatagtcaaggtctttgactgtgtttacttcatattcctgtccgttctgacgtacgacacgcaaggaacgggtgtaggcgtcggcttcaaagccaccggcatagctgataagagtggatagactttcatcctttttcatttcgaaacgcatcgggcgtttcacttttccgtcgatcttaaccaatacgtcataggcggggactattactacatcgccttcctgaagacgaatgtcatcctgaatgtttcctttcatgataaattggtagacgtcgatcgtggcgatatttttgccgttacgtaccagctgcacattgcgaaggcttcctatgtcactgactccacccgcacggtaaagtgcatgaaagactgtggcaaaagaagagagggagtaagtgcccggttggacaacctcacccattacattgatctggatagtacgtatgctgcccaaagtcagacggatgtcagaggtgggatcattcgcattattaagaccattatatatcttgtttaatgtttttttgagatagtcattggcttcagcaatagttagtccgttcaggttgacaggacctattttctgaatgttgatcgtgccgtcaggagaaatctgttggcggatagtgttctggctggctccccagatatcgataatcacttcatcaccgggacccagacgatagttcaagggggtggcgatattgacactgggttcaaaagtaaggttacgggtgttgaaaatatttcgtccgaaaacctggttcccaagtgcgaggtcttgagtgctcgggtggtcttccagcatatcggaagtgttttctttcatttcctcacgaaggcgtgattcattgatgtcggtacccgttgcattggaagcattgacattgttttgctgctcatagagttgcttcacacgagttgcctgttctttggtcacacctctacgtgccagttcagaagctagttgtttctgttctttaccctggcggatgccatccttgacatattcaagaacttgggagtcgctcatattttgagccattaaaggagaaaaaactcccagcaacagaatgaatagaaatacgttaaattttcttcgtgttgtcattggtgatctttgtgggttctacataaccgattggcatatctacacaagcacagccaagcatatttaaacgaacggcaatcttactcttcccgcctacagtcacaagttcgccaacaagtccactcaaaggaccttttatgacacgaactttctcaccacgcgctagtggagtatcattcatacagactgcttcttcggaataatcgagcatgaaacggaaacgggccatctgctcgtcaggaataacggcaggagtactctctccacgcatcaccatataacggctgaccgtagaaaatgaaaggacttccatacgttcttttggattgacatgtacaaaaaccatcattgggagtaagactgtatcaaccatcttacgacggtcactccattgatggatttgttgttgaacgggaacaaaagaatcaattcccatcttagacaaacgctcggcaacttttttctcgtgatgcattcgaacgagtgctacataccagcgttttgagtgtgctacgccttcccctgtcccactactaggcccggcatttactgatttcggtttcgttaaaatcatatttttttaccccatgttcatccgttacttcttaggtaacggacaacacacatatagaatacacatcgctgtgaaaaaagaaaaaaatcgattatgagggaatataaaagcgggcacctaacattcaatataaaacattcttgaatttaggtaataaaaagcctttgagcatgaagatgttatccttcatgttcagatagatttatgttgcatattttagagaaaaaggaaaaaaagaagtttattgtttgtttgctattaatatttttacctatctttgtagcgaatataattccgttacctaagaagtaacaccagcattaagtccctaatccataatgctttaataatataaatcagagcattttaaaattgcaaacgtaagaataattcaatttatttacttttgttctttcttccaattcgaaaccctttaaatatatctgtgttgttttaatagatttgtgtcctagtgattcgctaatcatttcgataggtacacctctgtacttagcagtcgtagcccaagaatgacgaagcgtatacgacgtgacgggcgaatgtagccttaattttctggacaggcttttcaactcattattaaaacatctcaaagctgactgatactcacgataggctccttcttcattccgcttgtacgctccgcttaatatccggaaaagataatcaggatagccagaactccgggcgtcagatttattgtacaatcccccaattgcattctgcgctgactccagcacttctatactcataggagtaccggtcttggtacgattgtacttcaaaagcccccgctccagattggacttttccaaatgggctaaatcagaaaaaggcattccacaaaactgaaataacagattggcaatggcctgcgtccggcgaagcttttccgattgaggatctttgtttaatagcatgtgaagttcgccgatcgggatagctttcttctgacgtgtgtccaccccggtaaaaacatcccggaacaaaccatgtacataaggagcctgatgcatatcgacaccacgattgtagatactacgcaacatacgcatatacgtagaaatcgtattgggcttcaaacgggaagccatcagatagttactatacctctttagagtttcacggtttatcttactaaacgtgatggattgagttccacaaaactgcgaaaaagaacgaatagcgtgtttatacacatgggccgtagaataacgaccctcttgtcgcaaacagtcgatgtaattgtttgcacaaatagtaaatcgatttttttccataaattataacttatctcatacgtgttattaaaaacgtgcggaatatagtaagattatagataaaatgaaccacgattttaaatttaattactgttttagatagaaattcgaattatttctaaaaaaaataagtgaagccatgcagtattttcaataaccatgcatttaacttataaaagaggggaaaaagggaaatcaaaccatatatcattaaaacctacaacctgaacttaacaagtgaagtggggaaaaataaaaaagagagagagttttttatacaacgtccccaaaaacgaggaatccctgccaattttcgagttggcagggattcattttttatcttcaagaagataatctttttacttgcagtatttggttatcaattcatctgcgttcggatcacccaattctttcgctttcttaaagttgccgcaagcttcatctgtcttcttcagctgtatctggcaaagtcccaataaacggtaagcctcaccatatttaggatcagtcctcaatatattatttaaaatctgaatggcttcttcataccgtcctacacggaggtttacaactgcatgctctgcctggtaggtgaggtctgtcggattcatctcgatggccttggcaatatcgtctaaagcgcgttgaaactgacgtgctttcaaagctgcctgttcgcgataataatagaacacgtcgttcacttctcccttgactgccgtatggtaagcatcataatcgagcattgcatttcgcgcctgatcggcattcatattcatctgcgcacgttccaacaaatatggagcaaagtcggccgtaatcggttgcgggcaacgggtaatacagctatccattaaggctaccacttctttcggatcccctttcagcagttctttcgtcttggcagcactaaagaaagtggccggagaagcaatattgctggtatttaccttttcataagcagccaaagcaccggcatagtcttgttgggcaaacagtatatcgccttccatttgaatgtaaattggcagcggatcaatagcgattgcctgacggacattcttcaaagcggtgtcatacgtccagtctttataagttttctccggcttcgataattgataagcatacattagcttacctatattataatatacatcatctttcttctgggctactttcagagcttgattaaagtcggcaacggctttatcataccaggtctgatcgtctttacctttagatgcataataattggcacgacggagataaccatctgcattggcagggaactggcgaatgaagtcatccaacagcttttcatagtcctcgcccgagaggctcgaagaggccatgaacagatatactaatgcctgatcttccgtttcaggtaaacctttccggataccaatgcttttcaaggcagcgtctcccaaagaaagagcactgattttctgcgacatggcaaaagctgctcccgccgcataacaagtagtcaccgtatcgataccggatgatttctgcgcaataccaaatacctgaccttccgcattcatcaccggacagctcaccatcttatctttcatatgcatgctcaatgtataataatggtattctccggctactttggaaacatctttcaccttaccagtaacgcaagcgatacttttttgtgtagaataaggaagcatccacgcatcggctcctgtcgccggggctgttttagcaacgaccagcgcaggcactttcttctcggtgatagccacacgaaacttaatgacatcatacatgtcattcgctccaagtattaggctgaccggcatctgcttgccttcggaagtaatcactaccgcacgttcagctcctttaaaaagagtataatctgataaagccaatccgtcttcggatacaaagaatccgtttcccgtattcagcattttatcattcttgtcataagtcactattgagaagactgcacgttttgccttctctacccattttggggtttgtgccatgcttccttgtaccaggaagaaaagcagcaaaggtagaattaaaatcttcttcatatcagtcattgtttctttgtttcacagcttcgtaaatcaggataccggcagctacagagacattcagggattcgatagtgcccagcatcggaattttcacccattcatcacagagggcaaggttttcataagaaactcctgtatcctccgctcccattatgatgcagaggggacctgtataatcggccttggtatagtcataatctcctttttcggtagcagccacaatgcggaaaccactgtctttcagatattgcagagtcgaacggaggttctgttcacggcatacaggaagagtatgtagcgctcctgccgatgtttttacggcatcagcattgaccgacgcactaccccggacaggaataatcacggcatcgacagctgcacattcgcaggtacgtgcaatcgccccgaaattgcgtacatcggtcactccgtcgagcataacaaaaaacggattttttccttgctcaaacaagaaaggaacaagatcctccgctttctgataagtcacagaagaaatgaaggcgatcactccctgatgatttttccgggtaatacggttgatacgctctaccggaacacgctgaacaggtatcaacgtacctttcaaagctgcaaaaagctccttggaaagatcactttgaatatctttcttcacgaggatcttatctatttcttttccagcctgaagggcttctatcacggcacgaacgccgaaaatcatttcacttttatctaacatctggttgatttactattttactatttactattcactatttatcagttgcgggcaagcagggatttggcattgctaagggcagcttcggtgagagtggcgccactaagcatatgagctatttcctctactcgttcttcgtcagtgagacggcggatatggctgttggtttccgtatcgctatctttcttgtataccttataatgagcacgcccacgggcagcaatctgcggcaggtgggtgatactgattacctgacggttgcggtcgcccatctcctgcatcatgtccgccatacggtcggctatttcaccggagactccggtatctatttcatcaaatacgatggtcggcagcttgacggctccggcaatcattgccttgatagaaagcatgacacgggcgatttcacctcctgaagctacggaagagatattctgcaaggtgccgttcttattggcggaaaacaggaagttgactgtatcttctccttgcaatcccggctctttcttcagtcccatttctatctggaaacgaacattcggcattcctaatggaatcaaccgggcagccagctgtttttcaacttcacgagcagctttcgtacgggctttggtcagcacttctgcctgttgtttcacttgtttatattgttcctctttgcgagcagtcagttcggcgatacgctcatcataggaagtgatgtccgacaatttgctgcggtattcatccgttagtgctatcaattcgtcaagggtttgtacccgatgtttctgctgtaaggaataaatcagattcaaccgttcattcacttcgtccagacggaccggattgaattcaacggagtcactttgtaaagagacttcgtgcgaaatatctttcagttcgatataagcgctctccatacgttcggtaagttccttggccggctgatatactctttgcagattattcagtgtattcagactgtctttcagataagaaagcaatccaccttcatccgaagcaaacgactgttccacccggtaaagtccggcttttatctcttctgcatgacttaatgtttcagcttcctgctccagttcttcctgttcgccttccaccaaacaggcttcttcgagctgttcgagttggaagcggatataatcttcatcggagcgacttttctctgccagtgacactaattcagcgagttcgcgatctgtctgtttccattcgtcataacacagatggtatttcgccaatgcagcgtcattatgtgccagaatatcaagcacattcaactgaaatccttctttattaagcagcagattctgatgttgcgaatgtacatctatcagctgttcgcccagctctttcacttgtgccaacgaagcaggagtatcgttgatgaatgcccggctcttaccggaagactgcacttcacgacgcaaaatgcactcttcatcatattccaactcgttttcttcgaaaaacgaacgcataccataggcagatatatcgaaacgtgcctctatgatacatttggaagctccgtggcgaatcgctttcacatcggcacgctgtcctaacaggagtccgatagctcccagaataattgattttccggctcccgtttcacctgttataacggaaaagcctgtttcaaaactgatatccagtttttctatcaatgcgtaattctgaatgtatagtgaacgtaacaccttctattttaattaaagattaaaaattaaaaaccggaagacagagtggctaccagacggtcgatgatgtcttgggctacttccgtcttcggcttcagaggatagtctgtacgacctttcctgtcgatgatacttattttattggtatcatggcgaaaaccggctccagcatcattcaacgaattgagcacaataaagtcgaagtttttgcgttcgagctttccttcggcattctgctgctcattattggtttcgagggcaaagccaaccaataactgatttttccctttcagtgctcctaaattggcagcgatgtcttgtgttgcctgaagatggagggttagttcctcttctttctcccgcttaatcttcttgtcggccactgtttccggacggtagtcggctactgccgcacaaagaatacctgcatcagcatctggaaaatagatctgtgaagccgcatacatttcttctgctgattccacatctacacgccggatacgggaatgtttcgttttgagctgcacaggacctgttatcaatgtcacctgcgctccgcgacgggcacattcttctgccaacgcaaatcccatctttccggaagaataattgcctatgaaacgcaccgggtcaattttttcgtaagtaggtccggctgtaatcatcactttctttccggatagttcatcactcgaagcgaagaattcatccaatacccggatgatgttttccggctcttccatacgtccctttcctaccaagtggctggctaattctcctgttcccggctcgataatgtgattaccgtaggaacgcagtatatccagatttttctgggtggcgggatgggcaaacatatcgagatccattgccggagcaacaaacacgggagcttttgccgaaagataagttgttatgagcatattgtcggctattccattggccattttaccgatagtagaggcagtggcaggtgcaatcaatacagcatccgcccacaatccgagatcgacgtggctattccacgttccgtcacgctgggcaaaaaactcactaatgactggtttgctggtcaaagccgaaagagtgatgggagtaataaattcttttcccgccggagtaattacgacttgcacttccgctccctgttttatcagtccacgaatgatatagcacgccttgtacgcggcaatactgccggtaattccaagaattattttttttccttttagcattattttgtaatcaaattactcatttcacgcaaacggatttttgtcaatgccgccttagtgttcaacgtgaaatcactattcaaaatccaactgtaatatccgggatctttcttcaaaacctcggctacagacattcctttatattttccgaagttgaacacttccaccccattatcatcgtacaccatgcgtccggcaaagtctacattcttgctgaaacttgaataatctgccaggaacgcaatatcattctgaagatcggagtaacggtcgagctgtgctttcagcacttcgtaagtggcccgtgtatctgcttcggcagtgtgtgcatcttccagattcttgtcgcaatagaatttataggcagcagacaaggtgcgttgttccattttgtggaagatcacctgtacgtctacaaatttgcgtttcgtcatatcaatgtccactccggcgcgaaggaactcttcagcaaggacaggaatatcaaaacgattggaattaaatcctgccaaatcgcaaccttcaatgtccctggctatgtttttcgccacttctttgaaagtagggcaatcgactacgtcggcatcataaatgccatgtatagcagaagatgcttccgggatatgcatttcaggattgatacgtaatgtttttgcttcttcatttccattcggatatactttcagatagcagatttcaacaattcggtctgtgttgatattggttccggttgtttctaaatcaaaaaaaacaatgggatttttcaggtttaatttcatttctaattattttttccaccacagagtaacacagagttctacagagcaataaatacataaaacactctgtggaactctgtgttattttgcggtgattactattaatcatttagcatcatcggcatcagcagcatcagcaggtcttcgttttcttcctgctctaccgggatgattactccggcacgtgaaggatctgcgagttcgatgactacttcgtctgctgaaatattgttcaggatatcgatgaggaatgtcgatttgaaaccgatgctcattgctgcacctgcatactggcaaacttgtgtttcttcggcagaagtagagaagtcaatatcttgtgcggaaatcacaatctggttttcctgcatacggagtttaatcaaactgcttgcctgcgatgagaaaatagacacacgacgcaaagctcctaccaactgttgacggtctacggtcactttgtgcgggttgttctgcggaattaccgagttgtagttcgggtaacgtccttcaatcaggcggcaaaccatccggtagctttcgagcatgaatacagcattacgttcatcgaattcgatcgtcactgtgccttgttctttcggcaaaagattcttaagcaaagtagccggtttctttggaaggatgaaggctgcacgctcgttacctttggctgccaatgtcttgcaacgcaccagtttatgaccgtctgaagcaaccattgtgatgtcttctgtggtaatatcgaaataaataccgttcatcaccggacgaagttcgtcatcggcagtagcaaacaccgaacggttgatacctcccagaagtacactagcctccatttctacacggactgcattatcacccagtgtagccgattgcgggaattcatccgcattctgccccatcaggctgtattttccgttctggtactgcactgttatttcataattatccggattgatttcaaatgtaagtggttgttccgggatttctttcagtgcatcaagcaatgttttcgctactacggcaaaacgcccgtttgtatcgctttcattcacttctacggtagtcaccatcgttgtttcactgtcggatacagtcacagacaatgttccgtcttccaattcgaagaggaaacaatcgagaattggcagcgcattttttgaattaatcacacggctgatggcctgtaaatggctggaaagagcagtacttgaaacgataaatttcatatattttcgtgtatttaagttttaaatgttctatcgcacaaagttacgaaaaaagatttgggctgcccaataaaacaaaagaaaaaaacaggcattgtgtgagggatattactaaaaaattgtaacttcgccccagaatttaaaattatcgcaatggaatttacaggaaaaatcatcgctatcctccccccgagaggcggagtttcaaaaactagcggcaacgagtggaaatcacaagagtacgttatcgaaaaccacgaccaatatccgcgcaagatgtgcttcgacgtatttggcgcagacaaaattgagcagttcaacattcaaatgggcgaagaactaactgtatcattcgacgttgacgcccgtcagtggaacgatcgttggttcaatagtatccgtgcatggaaagtagaacgtgttggtgcaggtgctccgatggcttccggttctcccgttcctcccccacctccgtcagctatgccggaatttactccgggggatgccaaagacgatctgccattttaaaccgaaagccattcgccggacgaataagcataaaaaactcccgataggattaaattctgtcgggagttttttttagaaaaacgattgtaaacaaacggtcattttttattctgatttatatttcaaaacaatgttaggatataccactccgtctgtacaggcaaactgaacaaagagggtgaaattatggaaaaaatcggcgttacgcagaaaaaaatccggtacaaaacgaacgtggttttctgattgccgaaatatgtggtcaaaatccgccatcaacataaagtggtatgaatcagacaagtgatccatgcctgcctgataggccattactccattaagcacttcgcctttatccagttggcgaatatattgtgacagagcattctcatcaggagcaagcaacaaacgcccgtcatagaacgccgcatacacatccaaagtggcctccacaaaactggtcagttgtttaaacaatgttgtttgaggcaaccgatagaccaagtatgccttatttacagtataaccaaaagtaatacggggagtttttcttccttcatctgccgaagcagtattgacaagggtacgaagcatcctttcagcttccgtcacatctgccacagacaggctcaagactgccgctgcatcctgcaacgtatcttcacgctggaagagacaggcaaccaggtcttgcccggcattttccatcagatagcgggaaaattccttatctctattctgcacttcactcgtgcggactgccccgttctgctcctgcgcatttccataagaaagtaaagacgcccagtccgtaatcccctgtctgctaaaatagaaagcagtggagggcagtgcttcacccgggaagcctttgactgattgctgctggcgaagttgttttataaatgcaaaacaagtgtctgcatcatgagtgatgccggagaaatagataaaatcatctttcatcttcatgtcaaattccgtccatcccatcatccctttcatacgggcatagattgtggcggtcgctgcacttttttttggagcacgcactcctgtaaaggtaggatcatctgccaatgatttaccactcttatatgcatcaataacgttttcaatcagttttttctgaaaacttaatgccataaaatcagacgtcagatagcaggctagaaaatcaccatctgccatcgggtaaatgattatttcctctcctttgtaaacaaacgttttcggtggataaagcgaagatatatatttacgcacaaacctgtttaccaattccttatccccatttcccaatctgcaataaagtacctggttccgttcgttatccggttcgtggaaactaatcagcatctgattcatttgccgactcaagccatggggagtatcttccgagagggcataaaggctttgtttcagataagaaaaaagtttggacacataaatatattgctgatttttactacaagtcagatcatcgacctccgctacaaactcgagcacatcatcggtaacaaatacggctgaagtggtggatggaaccagttcataaagatcaaaatctttctgcccttcggccgccgacagtctaaaaaaagagtacaatgcgaaacctgagcacaaaagtacaacagaagacgtgatcgctattttcactatcgtacgaagtttcataatattcgctgtttatcggctaggtgcaaaaataataatttctacaaagaaaacaaaacttttgctaaaaatttcaccgataatcaaagatagatatccaatccgtcgaatgccaggtgaatattttccggaaggctcttttcaacctccgcatgcaagcccatatcatgactcatgtgtataaagtacgtcttctttgcctgaatgcgctgcgccactgccaaggcttcttccaaattctgatgagtaggatgcgtggcaatccgaagtgcattcactaccaaaacatctattcccgccaattgttcataggattcttcgggcatggtcagcatatcagtgatataacctaattgcccgatacgatatcccagaataggcaatcggccatgcatcacacgtaaaggaagcacctccgtgtggttaactgaaaaagcctgccccaccgagatttcctgcaaaggaatgtcaggaactcccggataacgatggtcaacaaagcaatagggcatacgcaagcgcaagccttgcgccacataattttccgcataaataggcactgaaccaaatcggcaaaacggacgcaaatcgtccaacccgcccacatggtcataatgttcatgcgtaatgagcacaccatctatcttctcaaaaggaagacgcaatacctgtgtccggaaatccggaccgcaatctatcaaaattcgcgcatcatctgtctcaacaatagcagatgcacgcaatcggttatctttcggatcggtagaagtacaaaccggacatgtacagccgatttggggtactcccgtcgatgttccacttccaatgattcttactttcacttgttacttctcaatttattaagttaacttccgggtggatatcaatgccgaacttctcatgaacagaggctcggactgcatctgaaagcgcaagaatatcgctaccttttgctccaccaagattcactaacaccagcgcttgtttatcatgtacggcagccggacctaaggccttacctttccagccgcattggtcgatcatccatcctgccggaattttcacccgatcttctgccagctcatagtaaggtatccggggatattcctgctgcagggcttccagtttttctttcggcacaatgggattcataaagaagctgccggcatttcccattacctttgggtcgggcaacttgctctcacgaatatcaattatcactttccgtacaacagaaagcgtcaatgccggatatttttcaagctcctgacgaatggttccataatctaacgtataatgttcttttttactaagtcggaaacggacataggtgacaaaagccgacttgttttccgggcgtttaaagatactgttgcggtaggtatatccacactcttccaccgaataaacgcgttcttcagcttgaatgttcaccgtttccacagctgttatcagatctttcacttcaacgccataagctccgatgttctgtaccgcgctcgctccgacctcaccggggatgagcgacaggttctccgttccataccatccatgttctacgcaatatgcaacgaagtcatcccatactactcccgctcccactcgtaccgacacagagtgttcatcttcctccgtcacttcgattccttcaatgcgggaatggagtatcaacccgtcgtaatctttggtaaacagcaggttactgccgccaccaatatgcaaaaaaggtgtcacaatggcaccttgcacaatcagcttcttcagttcttcaaccgaagaatattctaaaaaacgagcggcactgacatcgatgccgaatgtattgtagggcaaaagagaatacatatatttttagttataagttatactgttatagtgcatcttaacctgtatcagatacttgtatcttcaaacttatacaattcccattctccggctttccggcggaaataaaggatattggaaaaaccatttccgatacctttcaacgccaggattttcgtgggcgaatcatcgtcattccgctgtccgtaattaatattagaaaggcggtcgacaggaagtaccggtttgaaggcgaaccactgattaagatcgagggttgtctccaaaatggagaaatcatcgtccggatcactggttacaaaagccaacggctcccgcacacgctgactctgaaaaagactatccgttgcaaaatgtccgaaaaactcaacaaagttttcattatcactttgttcaatgggccgcaggttgattgcctccagtatccatgcacctttgatacgttcaaaatagtatcttttcaccattcgtgttttcacgaacatccactctacctgcacagaagtgagggaggtatctcctactaaatccatgtcttcttctctatcaaacagcagtgtataataatgctgtttggtaaacaagtcatcatgcttccagttgcgttcctcaatgtttgacttcttatctccattgtagtagggcaatggaaatttcacacgctgacgctgtaacacatcatcggaagcaaaattgtaaataaaatcatcgaaagattcatccgcctgtataggctgcggatcttccggcgatttatcatggtggctagaatcggctatctgccggactgaatccacctctttagtaatagatgcgaaggggtcaatatttgttttcttgtttccacaagagctcaatataccgagcagtatgacccctgcaattagttttttcattatttcagtttctctcttaacttttcaagcatatccaccgtcatgctttccaaattgtaggccggcttccatccccactcttcacgagcacaggtatcatccagactatcgggccagctatcggctatacgctgcttcaaaggatctatatcataaatcatctcaaactgcggcacatgcttcttgatagcttgatatatcgtttccggatcgaaactcatggaagcgatattgaaagcattgcgatgtatcaatcttgccggatcagcttccatcagtgtgattgctgcattcagcgcatccggcatgtacatcatatccattaaagtgccttgcttaatggggcacacaaacttttctcctttcactgccgagtagtaaatatcgacagcataatcggtcgtacctcctcccggaggggtcacattcgaaataatgcccggaaaacggacagcacgagtatcgacaccgtatttattaaaatagtaatcactcaacaactctgtcgttactttagtgactccatacatggtacggggacgttgaatggtgtcctgcggtgttttcgtgtgaggcgtactagcgccaaacgaaccgatagaactcggagtaaacaccgcgcacccttgttcacgtgccacttccagcacattccacaatccatcgatgcctattttccaagccagcttgggtttcgactcggcaactacggacaacagagcagccaagttataaattgtatcgatatgatactcttttactacagatgcaatcgcctcgccgtccgttacatcagcaatagccgacggtcccgactcctttaattcccctttaggttctgcacccggaatataaccagctactacatttgcatttccgtaacgtttacgtagctccatcgttagctccgaccctatctgtccggtagctccaataatcaaaatgtgttccattttttcttctgacttagaatatcaagcttaaatagtgcgcaaagtaagcacttttttttcagattttaatcaaaaagacattgttattccaagaaaaattgtgtcctttgcaatataacttaatcacccaaacactatgtacggtaaaatgcaagaatatctccgccaaacattggctgaaatcaaggaagccggactttataaagaagaacgactgattgaaagtgcgcagcaagctgccatcactgtaaaaggtaaggaagtattaaacttctgcgcaaacaactatctaggattgtccaatcatccccgattaatcaaggcttcgcaggaaatgatgaacaaccgtggatacggaatgtcgtccgtccgtttcatttgtggaacacaagatatacacaaagaactggaaactgccatctcggactatttccagactgaagacacgattctgtatgctgcctgcttcgatgctaacggcggtgtattcgaaccacttttctctgaagaggatgccattatctcggactcgctaaaccatgcttctatcattgacggggtacgtctttgcaaagcgaaacgttaccgttatgccaatgctgacatgaaagacttggaaagatgtctgcaagaagcgcaggcacaacgtttccgtattgttgttacggacggtgtgttctcaatggatggtaatgtagctccgatggatcagatttgtgatcttgccgagaaatacgatgcgttagtaatggtggacgagtctcactctgccggtgtggtaggtgccactggtcatggcgtaagcgagttgtataagactcacggacgtgtagatatttataccggaacgttgggtaaggctttcggcggtgcactgggaggatttaccaccggacgtaaagaaatcattgatttgctccgtcaacgcagtcgcccgtatttgttctccaactcattggctccaggtatcatcggtgcaagtcttgaagttttcaagatgctgaaagagagcaatgccctgcatgacaagttggttgaaaatgtaaactatttccgtgataagatgacggctgccggatttgatattaaaccgacgcaaagtgctatttgtgcggtaatgctgtatgatgcgaaactgtctcaaatttatgctgcacgtatgcaggaagaaggaatctatgtgacaggtttctactatccggtagtgccgaaagatcaggcccgcatccgtgtacagatttctgcaggacacgaaaaagcacatcttgacaagtgtatcgctgcctttatcaaggtaggtaaagagctcaacgtattgaaagcggaataactccgaagcaaggtttccttgcggaatctatattttaggcgaggattacacggatcacacagatttcacgtatctgacacagttgctttataacaagcttcattctaaaaaacgtataatacgtgaaatctatgttatctgcacctaaattctcttttataaaatgaattttgaaccgctacttgactacaaaaaatagattatggaagaactgaccctcactactcctgccctacttttctcggcagtttcattgattttgttggcttacaccaaccgtttcttatcgtatgcccaacttgtgcgccaactgcgtgaccgctacgtggagaacccttcggatatcactgaagctcaaatcgagaatttacggaaacggttgaacctgacccgtacaatgcaaggactgggtattgcaagtctttttctttgcgtagtcagtatgtttcttatttatatcggactgcaattattttctgcttacgtattcggactggcactgattctgttgatagcctctctaggcgtatctttccgcgaaatacagatttccacccgttcactggagatttacttgggaacgatggagaaagggaaaaacaaaaaataacacggttgacaatccctcctattaagttttatcaagacactacccggcaaggaaggatgaccgtaaagcgacttcccttgcctacttcggatttgagttcaatccttccacccagtttttctataattacctgacaaatagaaagccccaatcctgctccctgtgaaaattcgttctgtttgtagaaacggctgaaaatcatccgttgttcttcgcgtggaatacctctcccagtatcttctacataaatccgcacatgcccctcatccggcagataaatataccctaatttgatatatccggtttccgtaaatttactggcgttattcaagaaatttgttagaacttgtatcaagcgctctctatccacattaatttccaaaggtatattatccacttctttcaggaattccaggcgtggagcaatcaatacctggtgagtcatataaatgtcatcaatcagctctctcaccctacatttcttaaacgagaaagacatatagcctgattcgatacgagaaagctccaaaatatcgttaatcaatttgagcaacaactcgctgttcttattaatagtgccgatgtattcttcgcgttctacggaactcaatccatcttccaatgccagaatattggcaaaacccacaatcgaattaagtggagtacgtatctcatggctcatatttgccaggaatgattgtttcaattctgccttttcagcgagtaagcgtgcagcttccagttcctcttcacgatcttttatatcttgtatgttgagcagcaaacctgctgttttatattcaccacccgaaagctgtttagtagtataacgaaactcccaccactatagcctttaccgtcgaagttacaaagctcctgcacaatttttttatgagcacttttcagatttcgccagttgaacttcactccctcccaatgatcgggatgaataaagctcatgaattccttaaacgatagttgtctaggatttaacccttgcgacgcccagaatgcatcttcaaaaacaaaacaacccttatccaatctccaagcatacgtcattccaccctcaatggctaatgacaatgtttctttttcatcagccaatgctataagagcctgttttttcctcatctgttcccgaagatatagccaccaaagagaagcaaaaagtaaaatcaggaaaagaacaaatgaagcgactaaggctccccacaaaaatggatattcatctctgaacggaatattgataatacgatatttagcaggaatactttccttactcaaaccaatttgcgtcattgtattccagtctacgacatactctttccggctttcaacaatgggtatatccgaagggcttgcgccatgtaatatgcgaacggcagttttcacctcttcttctacctgaataggcagcgaagtgatgtatccacccaacaacttctcaccaaacccaaaggcttcattgatggctgtcagactaggactaccacagatactcccaatattaatagtggtgtaatcacgtttcaactggatataacattgatcgcggtaactcctgttcaaaacccacataaaagtagcattcgaatggtttctggcattacgcaaaggaatagccatgaaacgggtatagccttcttcctgtgccaaacgtatctgttcttcaggagaaagttcgggattatctatgaatccggtcactttatatcctttaaactgctcctttgcatctcttctgatttgtctgtcgatataggtagtatcaagcatggtaaacaaacgaacgtgctcaccgaaaagctcttttgccacactgatattctcattaaaggctatcttgtcatggaagcctgtcacgttgggatgatgtttcagtaatccccaattcggataattgacaccaccaaaaactacaggcacttctttcgccaactgaattccgcatttcatcaatgaataagtagcctagtcttcattcaccagaatcacttccggccgccaatctttcgatacggaatcaaccagaaagcgcatccgctcaagttccggctcttcccagtaggattcacagtctaaataaacggtacgaatatcagcatcaattttctctttttcaaattgctccgctatcatccggttaaattccggataagccgcataagtctcctcataagagtggataaccagaatacgccgttcttctttttgagaacaactactcacccccaaaaagagcaataaaaatacagggagcaatctaaaaattcctctattcacaccattcatttataataatcgggattaatttttctctgactcgtaatacaaaggtagtttattttcgaacatataagcctaataagtgaaaaaaaagaagctgtctgaacagaaattcaggcagcttctatctatataaagaactattttttcagagtagcatcattaacgctgtcccaattgtgaatctacaaagaaaattccggtatcaccagccttcttgatcttgtcaacaatgccttgtgctgtagcttcttcttctacttgttcgcgaacaaatccccacaagaaatcctgtgttgctttatccttttcagcagcagctacgtctaccagcttgtctaccaattgagaaacatgacattcatgcttgtaaacgtgttcaaacacttcgagaggtgtaccccatccgttaggaacaacatctattttatctactttagcagttcctccacgtttgatgatataatctgccattgcataagcgtgtcccatttcttcctgggattgctttttcatccaatgagcaaaaccgctgaaaccttctttctcaaaatagaaagacattgctagatacaggttagcagaccacatttcagcagtaatctgttcgttaattgcattctgtaatttttctgaaatcataatcgtattttttattaagttgttaatgtagtttctttttgaactcattacaaaaataacaagctttcagttaaaattgttccatgcaccctatatttttaaactacattcacattttgattgtagtggttcattttttacttacaccagttcgtcggaagtatatcctttcggcagttcacgacagttgtatccggaagccattatttcaccataagcaccagcagaacgaagggctatcaagtcaccacgcttcactttgttcaggtcaattgcttttccgaaaacatccgacgattcacagatcggtcctactacatcgtatgcctccaatggttcttcggaagtaatattttccattttatggaatgcctgatacagagccggacggataagatcggtcatacctgcatccaggatggcaaatttcttccgtgtgccttgttttacatacaaaaccttagagattaaggaaccgcactgtcctacaactgcacgtcccaattcaaaatgcaaggtctgataaggacgtaatttcagttgtccggcataggtagcaaagtaatccttgaagttcggaatagcctgacgattgggatgtccgtagtcaattcccaaaccacctcctacattaatgtgttctaccagaattctgcgagcttccaatttatcctgcaattcattgacacgattacagagagctacaaaatcgcccatatccagaatctgtgaaccaatgtggaaatgaagcccgataaactttacgtttttcatctcctgcgccacatctatcaccttgtccatatcctgcatgctgataccgaatttgttttccgccaaaccggtagtgatatttgcgtgagtatgtgcgcctacatccggattgatacggaaagcaacattagccaccttattttgagcagcagccaattcattgattacttccagttcgggaatagactctacattgaaacagaagatgccgtactccagcccgaggttaatttcccagtctgctttacctactcctgcaaaaacaactttattggccggaaatcctgcacggatagcggcacgaatttctccaccgctcacacagtcggctcccattccgctctcacggatgatggtaagtactttcgggttagcatttgctttaacagcgtaatgcactgaataattaggatatttggcaacctcatggttaatagccgacaatgtatcgcgcagcactttggtatcgtaataatagaaaggtgtctgcaaagtgcggaatttatcgattggaaatattcccttcataattcgaaaaacttgtttagttggttaaaaaagagcgcttttatcagttcggtaaaagcgctcgtattatttgtggaattatttgccgttgaaaagcatatcgctcaacgattgtaaagctactttcttatcacactcccgaatgaggaaggagatgttatagttacttcctccaaacgagatcattcgcaccggtatatcgcgcatcgcatcgagtgcttttgcttcaaaaccgacattttcccattcaaggtcacctacaacgcagatgatacacatttctttatcaacggttactgttccgtatttcttcaggtcgtccagaatctcattaagatgtttcgtgttatctatcgtaacagatacaccgacttctgacgtacagatcatatcgatagatgtctgatagctttcgaagatttcgaacaccttacgcaagaaaccatgagccaataacatgcggctggatttaatcttaatagcagtgatgttatcttttgcagctactgccttaatcttgcctttttccgtatcgttagaaatcagtgtgcccggagcctccggatccattgtgttcaacaagcggacagggatattggcatatttagccggctggatacaagtagggtgcagaatctttgcaccgaagtaagccaactcggctgcttcttcgaagtgcagctggcgtaccggagcggtcttgtcaacaatacgcgggtcgttattgtgcataccgtcgatatctgtccagatctggatttcggaagcgttcactgctgctccgatcagagaagcggtgtagtcgctaccaccacgttgcaggttgtctatctcaccgtaagcattgcggcagatgaaaccttgcgtaatgtagatttccgtatccggataaagatccaattgagcacgcaatttatccttaatatatacggggtccggttctgcgttcttatcagtacgcatgaattccaaagccggaagcaacacggacttcacaccgcattcctgcaggtaaaagtttaccatcgccgtagagataagctctccctgtgccaaaaccactttctcttcgaacaaagtgaaaaggtctttagtataggagcggatgtagtcgaagtgggatttgacaacttcaagacctttctgtttatattcctgggttgcaaaaagctcatcaatatgctgtttatattttgcttccagcttattaataatctcgttggcaccctccggattcttcttatacagatagtccgaaatttccaccaatgtgtttgttgttcctgacatagcagaaagaacaacaatcttctgttcaccatcggtaatcaatttggctacttccttcatgcgctgagcagaacctacggaagttcctccaaactttaaaactttcattttcgttactgttttagttatctatatttaaatctatttctattgttctctgtctgggcatatattcatcagtcacatctacaatctgatggtcggcacaacgatataccctgcccggataatctttcaacagttgcaaattgtgcgtcgtcatcactaccgatgagccggattcgcagatattgtgcaacaattcaacgatggctttacctgtttccacatccagatttccggttggttcatccgccaggatgatagccggagaattgagtacggcacgtgcaatcacaatgcgctgctgttcgccaccggaaagttcgttcggaagtttataacctttgttggacattcccaccagttgaagcacttcttcaatacgatcctgtatctcctgtttgtttttccagcctgtggcacgaagcacaaattccaggttattatatacagtacggtctgtaagcagctgaaaatcctggaatacaatgcctaacttgcggcgcagttgcgggatatgcttacgtttgatagatcgcatattataacccagcacttccgcttcaccgtcaattacgtccagttcgccataaagagtcttaagcagactcgtttttcccgagcctacttttccgatcaaatagacaaactctcctttgtgcaattccagatttacatcacttagcacacagagttcctgttgatggatttctacgttcttatattgtatcaacgccccgtcatccatgccgactcccgttttaatttttaatttctaatctttacttattaatgcttcttccaggtactgctatgtctttcctgcagttcacgtgcaagatcttcgatgcgatagccttttgaagcaagcaatacaatcatgtgataaatgaggtcggctccttcgtagatcaaacgttcgtcagtaccgttcgttgcttcgatcactgtttccacagcttcctcacctactttttgagctatcttattgattcccgactcaaacagactggtcgtataagaaccttcgggcatctcttcgtgacgcttgtctatgaagtcctgcaatgctttcaggaacatgactggttcttcgtttttctccccccaacaagtatctgtgcctgtatgacacacaggacctaccggatctacttgaatcaataatgtatcattgtcgcaatcagcctttatagatacaacatgaaggaagttaccgctttcttcaccttttgtccataaacgattcttcgtacggctaaagaatgtaacttttccggtttccaccgttttatcataagcttctttattcatgaaacccagcatcaagaccttacgtgtctcgttgtcctgtatgatagccggaacgagtccgttcattttatcgaaatccaattccatttttatataagttctaattactattccaatttacaattactacctattcgcctacggaattcttttgcagacagttcctatatttatctgactatataatccatccgcaggaaaacccggccggggtgcctcaccccctgatggtaattccttcgccgcaaagatacgattttaattcgggaattttaatttctccgaagtgaaaaacactggcagccaatgcagcatctgcctttccctgtaaaaagacatcacggaagtgctccttacagcccgcacctcccgaagctatgatgggaataaagagttgatccgctaaagcggcaagtgcttcatttgcataaccggcttttacaccatcgtgattcatgcttgtgaagagtatttctcctgctccgcgttcctgtgcttctttagtccactcgaacagatctttatccgtttcgatgcgtcctccgttcaggtaacatttccaaccgttttcggtctgtttggcatctacagccaacacacaaacttgtgagccgaaattctttgctatctcgtcaaccaaccggggattgcggatagcggaagaattgatagaaatcttatctgcccctgcattcagcagacggtctacatcacttaattcattgattccaccacctacggtaaatgggatattgatattagcagcaatccgttttaccaattccgtaaaagtcttacgtccttcatggcttgcagtaatgtccaggaaaacaagttcatccgctccctgttcactgtaagcacgacctagctccaccggatcaccggcttggcgcaagttgacaaaattcgttcctttcacggtttgtccgtcttttatatccagacaaggtactattctttttgctaacacaatcctattttatttattgttcaacaatttataatctatattcctgaagctcgattcttatcttccttataataaaggtatcttatttattccgatacgctcattacagaaagattctcaaatcttgtaaggtgatatgtccttcgtataatgccttaccgaaaataactccgggaacaccggcctcatccaaggctacaatatcatccatcttgctcaccccgccactagccatcagataaaggtcagggaattttgccaacacctctttatacaaatcgatagaagggccactcaacattccgtcacagctaatatccgtacagattacttttcgtatacctttatctatataattttcgagaaatggaaaaagttcacaggcactttcatctttccaaccattgacggctatcttatgttcttttacatctgcccccaaaataatcttctcactgccgtatatttccagccaatgacagaataattccggatctttcactgcaatgcttcctccggttaccatctgcgcaccgctctcaaaagcaattttcaaatcttcatcactctttactcctccaccaaaatctatgacaagagaagtgcgtacagcaatctgttccaacacccgatagttaacgacatgatgagaagcagcaccgtccaagtctaccacatgaagcctgcgaacaccgttcgcttcaaactcctttgcaacttccaccgggttctcattatacacctttttactatcgtaatctccctgggaaaggcgtacgcactttccatcaataatatcaatggctggaataatttctatcatctatttactatttgtatcttagaggtttaaaaagtttgtcagaatcttctctcctgtcttaccacttttttccggatggaactgggtagcataaaagttatctttatggagcgcagcactgaacgggtgaatatagtcagttgtagcagcagtaaagtcgcaggtcggcacatagaagctatgcacaaaatagacaaactcttcttcggtgaacccttcaaacaatttgctattcgtttttccaatggtgttccatcccatgtgcggcactttatcctcatgtttctgcgggacaaaacgtttcacatccacatcaaagatattcaaacaatcgacttctccttcttcggaatgccggcacatcaactgcatgccgagacaaattccaaatacaggctgacggagattcttaatcagttcgtccagtcccgttgccttcaagtggctcatggtagtttccgcctctcccactccgggaaaaataactttatcggccgattggagttcttctttatcagcagtaatcaccgcttctacccccaaccgctttaaagcataatccacagaacgaatattgccggcattgtattttacaactgctactttcatcagctaaatattactgttttatttttataagccaaaactttgcgctcgatgtgcttctgcactgcacgcgaaagaacgattttttccaaatcctttcctttatttacgaggtcttcaatagcatctttatgagtaatgcgcactacatcctgttcaataatcggtccggcatccagctctgtcgttacataatgactagttgcaccaataattttcacccctctctggaaagctgcgtgataaggcttcgcccctacaaacgcaggaaggaaagaatgatgaatattgataatcttattcggataagcattaatcatctgttcggagatcacctgcatatagcgtgccaatacaataaatgtaatcttatgtttggcaagcaattccatctctttgcgctcctgttcttctttcgtctccttggtgatagggaacagatagaaaggaattccgaaacgttctgccacgtgctgcaaatccggatgattacttataataagaggtatctctacattccactctcctgccgtataccgggctaacatatcgaaaagacagtgtgacagcttggatacgaaaatagccatacgtggttttacatcagagaaataaagacgaaaatccatttcatatttttgcccgtagagtgttctgaaataatcttcaattttttcctgtggaaccagaaaatctttcagttcccattcaatacgcatgaagaagatgttctctacatgatctacatactgatccaaatagataatatttcctttgtttaccgtaataaagtctgtcacttccgctaggattcccggtttgtcgggacagtgcaataacagtttggctgttgtcatcattctttctactaattaacgattctaggcagattattttctacctttctaattttagtccgcaaaaataacgatttattgcaaaattacgaattattcaagcagaaagttgatataaaaacggtgatttcttacagatagaaagatatcgagagttattttcaatgaaaagaatgacaaactttaggatagtgacgccattgccttcggatagtgacggtattccatcgtgatagcgtcactataacgatcagataccgtcactatccgaagagaagaaaaacgaatattttttttcattacaaaagtactcaaaatgagacactaagcatttttcttgttttttcttgaaaaaaacttttctcaaaacgcttgcaggtttacaaaaaacaactacctttgcacccgcaatcgagagagatgcagattaataaattgaaattctggtgcgttagttcagttggttagaatacatgcctgtcacgcatggggtcacgggttcgagtcccgtacgcaccgcttctttcactaagaagtagagagaaatataaatgagttaatccaattaaaatttggtgcgttagttcagttggttagaatacatgcctgtcacgcatggggtcacgggttcgagtcccgtacgcaccgcgaaagcaaatagtaaattaaagcaaagctctgaaattcaagaaattcagagcttttttctttttcttcacttcatttaaaacagagtttaagtaggcgatagatgtgcccattcaaactctacaatgattttttaaccaatcattttattcaaatgtaacattcatcttcaattaaaggtacctatactaagcatctgtttataattgaacagagactacaactgcatgtgtaaaataggatattccttaccttctccgtccaaattcgaccttttatatatgttaaaacccatatattcataaaaaccgacagcttgaacattttgctcattcacatcaactttagttacttgcaaattatctatggcataagttattaatttttttccgattcctgcgcctcgatacttattgtcaataaataacatttcaagatttccttctgcaattcccataaatccgattaagattccctcttgttcaaatccgaatagattaacatactgaaaatataccggaagtcgttccttataatatagaaaatcttcctctttaagaaaatcatgtgtactcaatactgcactttcccaaatttccatcaaacgtggataatccgtaactttaatttttctaatcatacttgtaattgcaatttaaagccgcaaagttcgttacttatacattcaaaacactgaacccaagttaaaaaatacgtttacggattctgcttagtgcttgctgtgtgatacccaaataagaagctatatcttttaatggtatatagtttaatgtaataccatattcttccatcatctgtagataatactgttcaggagaatatttaatcaagtcgatatttcttttcaaaagtttattcaacaatatagcatttaaatcttcaaatacagtttttactttagggatagcggtatatagttcatttacttgcttcttgtctattcggtaaataacactatctacaattgtttgcacattaaatgcagacctagtttgtaatgtaaaagatatgtttgacattgaaaatgtaccctctttacaaaaccagaaagtttgttcttccccgttatgatttaaaagccaacaacgtaatattccatcaaaaacgaaataactatacctctctgtttctccttccttaatcaaaaatgtacctttactaactaatattcgttcaaaatattggtcgaataacttaaactcctcccaattaaaaatattagtactaaaattaaattctttaagtagtttttctaaaagcataatctaaatatgattcgtaatatacttactcatttaatatattcactattacttccgccctatttaacttctcatatttagtgaatatattttcagtagccatttttatattactcctttcgcccagtctccggcctgcttgacacttccgttcaacaatcggctttctccccatacgatttttggataaagtttcttgagttgttttacactattagttattgagcttcctccggaagtagcaaatggaataacggttttaccggagaaatcatatttctcaaggaatgtattgaccggacgcggacataaattccaccatatcgggtaaccaaggaatatcacgtcgtaatctttcagattaagcgcttctccccccaattctggacgtgaattttcagtcgtcatttcaattgaactacggctactcttgttgttccagtcgagatctgccgaggtataggctgtagcgggagttatctgataaagtttgccgccaaccgtttttgcaatggcatcggcggctttttctgtagttccagtacaagagaaataggcaaccaggattttcttatcggactgtacattagtatccgctgtctgattctgcgcttttgatgagcagctaaagcaaaggagactcataaatatgaatataatctgtttcattttattttgattttaaatatttcttatcattaattagtttagacattatcacgatggagtaaccccacaggcgttttcattcttccattactttgataattgcccatatcgtccatcaaacgatgtatttcttctgtattaagcgctttgcgcgtctttacatattccttaaaattcctcggtagtcatattatttcctttcaaaagataaagcaggattagcaaaaatcatcgtttagtctgttcgagtttgttatactcgtcatctgtgaccggctcaagccactcattggaagtgttttcaccggaaacttcgaaagccagatgagcaaaccaactgtcggcagcagctccgtgccagtgtttcacattggcaggaatatggataaccgtaccaggcagaatctctaccgccggtttaccttcttcctgataccagcctcgaccggctacaccgataagcatctgtccgccacctttcgttgcacggtgaatatgccagttattgcggcaacgtggttcaaaagtaacgttagagatattcacctgctcgcgcgaaaccggagcaagataactgttaccaataaaatactgtgcataggctgtattgggttcgccaatagggaaaatcatctcacgctggaaagctgttttggcatcctcaccaacaatatcttcagaccatactccttttgccaaattgaacgctgcccacgctttcggccaacctgcatagaaacctatatgagtgataatctctgcgatctccgtgcgggtgatgccgttcttcttcgccgactgaagatgataaacgagcgaattgtccgtgattcccatactgataagggaggtaatggttactaaactgcggtcacgcagaccgagtttgtcagtgcggctccaaacttctccaaagagaacatcgtcattaagttccgcaaacttgggggcaaacgttcctaactggtcgcgtcctgccgtctgtactatcttttcttgtgccataacattgagtgttaaaatactaaatactgaaaataaaaggagtttattcataatcatttcgtttattgaatgaagttattaatgcaatttgcggggttaagcggcatttggtcagagagtacgagagtcttaaccatgtgcagcgttccttgcttgtacttttgaaaatgctccgatgcaatatgagatttataagcctcctgactcgcgtaagtttcaagaatagttatcctgccaggattctctttttcgctgacggcatacatagtcagcactcccggttcagtacgcaaggagacttcacccacttcggtcgcatatttcatatattcttcaagatactccggataaacctcgattttcgatagccgcacaataccgtcagccgccataggtaatttggcgcacataccaggctgctgttttatatcctttttccctgtcatactgcatgataacataacgaataaagacaaaacacttagaattgtttttatcatcatcttctatcttttcattgttaaacttctgattacaaatttactgcgataaaacgaatggaattgtatatcaattacggatttttgtacccaaatccccgattctgtaataaagccgaataaaaatcagatattagaagtaaagttattcatctgttttgagaccgataagctacttttctcatcagactcttgacaaatgactttttatgttgtatctttgagaaaagaaaaagtataaacaacatgaaaatagaaagaaataatcatacataaatcataaataacctggtattttacaataccactcctatacgatatggggcaatagtcgaatgattattgccccattttgtttataattcagcttaaaatctctcgtctgatcctagaactgttctacaatagtttataataaactcgaataccgttttactaaaactatcaaaaagtttattataaacagaatccgggtttattaaaagccacgttaccttttgtcaaaaatagagtaaacaagatttctaagattcaccataaaagatctactacaacccaacaagtaatataaatacacaattattcatttacgtctttttttacacgatcgttttcctccctcacattccatctttcttttttcccaattcgttaattaaatcaaaaacttcaattacgatttgccgtatctaccatatttttacatacatttgcgtctgacacagatgtcaaacacgaggtctaatttaagatatttggtatatgaatgtatataaagtgggtttagatataggctctactaccactaagatggtagtattggataaagatggaactacagtcttgttttccggatacaaaaggcatcaggcaaaaatacaagaatgtttactcggatttctttatcctcaaatccgcaactaagcccttgaacgtccttattgcgtttacacgtcctctcattactgaatttgcagataatttgaacttgaagcacccacttctgcctacaatatccccttaccccacaatgtgacttgaggcaatacacaatatcattcccataagttgtaggcattatccaaaatcagtctggaaaacatctgcgtaagcattattacaggtatagatgttcagcacataccgccttgatgtcctgatccacttggctggtacagagataaacctgaagacaaacgcttttatgcgacttgttgcattgagcccgaacttctttacgtcaagtctttgaataatggccttgtaaaagttacggataagtgctgtaagaagaaggaacactgtgttctctgccatgaaggatttgggcaatctgtcccacccgaaaccattgttcatatcatcgaagatacgttcctttcctccacgaaggttatagaactcgacaatttctcttacggaagaatcatagtcgttagtcaggatacaacggtatgtgtattctccttcccaaaaatcctgcacaccatccatccgtttctgtctttgaatcacaagtcgatatgccttacctttccacttctcaacaaggatagagttcaattcaaactcaatgccattgatttcctcagttttccagcctttgagagcaaaggtgtcattgtagatcgaactgcagcggttagcacggatatagaaggacttgcagtgtttttctatttcctccacgatttcctcggaacatgatccacaatcagctctgaagcgattgatagtgagcccattctgttcaaatctcgcaaagaacctcttcagcgtgtccttctgatggaaacgaacatttgtgttaccatcgctattctctataccgactatcaaatcgccaataaccgccacgccagggcgataaccaaggaacttcttgtatgtaggctttgcatcatacttctctgtctctatgaactgatggtcgaaatcaacatcatacatctcaccctctttcagttggccagatgcaaatatacaattgagcaataaagtattgagagtgtcagccgtattgaaatcgtaggtcttgcccatatctgatgtgtatgaaatgttttcttgcgtcaactcctttatcgccctgaggatagtatcagagctacaagtgcgaagtgtcggatgaagcgagaggtggttcatcaaatgagtagtgacatcctcaatacatgaaccgctacagaagtagatactcatgagagaacggatgatttcgctgtactgataaccgaacgatctacaccttagaccgagggttgagtcgattacagatgataatgtggagtcaaattgctccatgattgaaaataatcccccaaaaggagtgagtctctcagatttaatttgtatcttcgccatgtctatcgtcggattctcttgttttttttgcaacactaagataagtgaaaattctgacatggcaaaatcctgagcaactttttgttgctcaggtacttaaaaagtttaatttataatagtgttgcggaattaaggtttatcaaataaaggaacagttgggtgatattcctttatctttccacattacgggctctgttggaatgggaatttcagagaaatgctctctgccgtttgtgcaagaggttgtagctgcaacaaactatgtgtgccgggagcatccgcacacagccactatgatcgatattggaggagaagatgcgaaagttgttttctttcaggacggacaggctacagacctgcgcatgaatggaaattgcgccggcggaaccggggctttcattgaccagatggctattctgcttggagtctccatcgacgaattgaatgaactagcacttcgttccaatcaggtatactctatcgcttcacgctgcggagtattctgcaaaacggacatacagaatctgatagccaaaaatatatctaaagaaaatatagcagcttccattttccatgcagtagccgtacagaccactgtcacacttgcacgcggttgcaatatcgtagctccggtattactctgcggtggcccattgacttttattccggcccttcgaaaagcatttgccaactatctgaatctgtcacaagatacagatttcatattaccggaaaaaggaaatctgatccctgcctggggagcagcattggcagagaacaatgaagaaagtattcatctctccaacctgatacaggtaatagaaaacaaactaagtgttacctcacctttccagagtgatctttctcctatattcgacagtgaggaagaatatcggtcatggaaaaaagaaaaagaccagtataaaattcaatatgccagtctgcgtcccggattacaggaagcaactatcggcatagactccggctctactaccaccaaaatcgtagtactcgacaacaatcatcgtatcctttactcctattatcacgacaacaacggaaaccctataaaaacagtagagaacggcttgcagaaactatatgaagaatgccggagacgaggaactaccctgcgcataaaaggaggatgttctaccggttacggagaagatctgataaaagcggctttccacatggatgcgggaatcattgaaaccatcgctcattatgctgctgccaaacatatcagcaaagaagtttcttttatcctggatattggagggcaggatatgaaagccatctttgtgaacgacggagtaatcaacagaatcgaaatcaatgaagcctgttcctccggttgcggttcttttatcagcacatttgcgcaatcgctggattacagtgtggaggactttgccaaagcagcttgtttttcgcaagcaccatgtgatctgggtacacgttgcacagtcttcatgaactccaaagtaaaacaggtacttcgggaaggagcgtccgtagcggatatagctgccggattatcttattccgttgttaaaaactgcctgtataaggttctgcaattaaaagacacggagatacttggcgaccatattgtcgtgcagggaggaaccatgcgtaatgattccatcgtacgaagtctggaaaagctgaccgggaaacaaaccttccgcagtaactgtcctgaattgatgggtgctcttggttgtgccctatatgccaaacaaatcgaaaatgcccgggtgacggagctgaacgagatgctccaatgggcgcaatatacttccaagcaacttcaatgccgggggtgcgagaaccagtgcgccattatgcgatatacgttcaacaatgacaaccattacttctccggcaaccgatgtgaaaaggtattttccaataaaggaagccatgcggacaaaggcatcaatacgtatgataaaaagctggaattattattcgaccggagcgcagacattccacaacccctatttaccataggcattccacgtattctgaatatgtatgaggaataccctttctggcataccttatttactgcttgcggcattcaggtacagttgtcggccccctctacattcagcaaatacgagactgctgccggcatggtgatgtctgataacatctgcttccctgccaaacttgtgcacagtcatatccgtaacctgacactgcaaaacgtcaaccggatatttatgccgttcgttgttttcgagaaaaaggataagcaacagcaaaacagctataattgccccatcgtttccggttattcggaagtcatcaaaagtgtacaggaagagaatataccgatagatgctccgactatcaccttcaaagatgaagcattgctgtataaacaatgctatgaatatctgaaatctttgggtatcagggatgaggtatgcaaaaatgccttctcacgcgcattacaggaacaatatgctttcgaagaaaaaattgctgcctataatcaggaagttctgaacgagggacgggaaaaacacaaactgattatcttactcgccggacgcccttaccatagcgatccactgatacagcacaaggtttcggacatgattgctgcgatgggagtttatgtgataactgatgatattgtccgccagcaggagatttcattggaaaagactcattacctctctcaatgggcatttaccaaccgtattctgaaagcaaccaagtgggcggcaatgcaagagggtgacatacaatatatgcagatgacttcttttggctgcggtccggatgctttccttatagatgaagtacgtaacttgctgaaacgatacggcaagaatcttactttgctcaagatagacgatgttaataatatcggctccatcaaattacgagtccgctcgttggtggaaagcttgaatttcagtttgaaacattctcaagcgaaagatcccgagccatttgtttcaactgctcctttcaccaagaaagacaaaaagaagaaaatcctcgctccattctttacgcctttcatttcaccactcattccatccatcatgaaagtggccggatatgaaatggaaacgttaccgttgagcgacaccgcatcttgcgactggggattgaaatactccaataatgaggtatgttatccggcaacattgattgtcggcgacatagtaaaagcctttaaaagcggacgttatgatcctgccaatacgtgcgttgccatcacacaaaccggtggacaatgtcgtgccagcaactatatttcactgataaaaaaggcattgattgagaatggatacaccaatacaccggtggtatcacttgctttcggcagtggtattgaaaatgagcaatccggttttaaagtaaactggctcaaggttttgccaatcatacttgcgtctgtgttatacagtgattgtatcgctaaattctattatgcagccgtcgttcgtgagaaagaacggggacaggccgcccgtctgcgcgatctttatctggatacagcacagcccatcatccagaaaaataaaccggaggacttgttgagttacttatatctcgctgccagagacttcaacaaaatctgtgaacagagatcctgtcacaaagtaggtattgttggagaaatattcctgaagttcaacccttttgctcaaaaggacgtcacctcatggctcatcaaccagaagatcgaagtgattccgccactgataagtgatttcttcatgcagggatttgtcaacctgaaagtgagacagaaccaacacttgcagcgaaaactcactcccgactttgttatcgactggttatacaagaaagtccagaagcagattaataaagtgaatgaaatcggcaaaaatttcaattacttcacgccgttcgaatcaatctttgaaaaggcagaaaaagctaaacaagtcatctccccgggcacccagtttggagagggttggctgatatccggtgaaatactatcctttgcttcccaaggagtcaatcatgtcattagcttgcaacctttcggatgcattgccaatcacattgtagaaaaaggaatagaaaaacgtataaaatcgctgtgccctcaaatgaatatactatctttagactttgacagtagcgtcagcgatgtgaacataacaaacagattattactttttattgacaacataaacaactaaaattatggctacaacggaacatagcgatttagagcagcaaataataaaaactgcccaacaactttttatagaaaaaggatttgtggagaccagcatgagtgatattgctgcaacggtaggaatcaaccggcccactttacattattatttcagaaccaaagataagatgttcaaagccgtgttcggctcgatagtcatgtctttaatgccgaaaatacaggatatagtaaaacaggatatcccatttatggagcgactaagcatgattctggatgagtatattgagcttttcacaagtaatccctgtcttcccagattcatttgcggagaaatacagcgtgatgtaaaccacttgcttgccactgcaaaagaacttcagttcggagatgctttatcccaagtgaaagacagtatactgacagcaatggaagacggtaaacttaaaaaggttccgatacatattgtatttctgactgtctacagcctattgagctatccatttcttgccaagaacctgatagtatctttattcttggaagatgaagccgcttttgctgacttcctgcaagaatggaaacaaaacatcatcaaccaattgcagaacttattgtgttatgaggaatagtatagatactatataaggaggtgtgtcataatgaataataaaacgcagattaacgcaaattatcgcagattattccaattatattgatatattaatcaacgacttataaaattatttctgcgataatttgcgttaatctgcgttttgacacactccgttattaccattccaatcaccccatcttgcaccttattcgaccacaaaatcttccgatttaaaattactatagaaacgtcctgaaatagcagtaaacttcaatacacagtaatcgggatccgtcactccctccggataatacatggtatctccctcctgccagatcatctctttactggcactatccgtcaagacatccatcgtaccgcgtagcatgacacctctaaagaatctcgtatcacagaagtagatacacgcatggttgttctcacggtattgcgccacacgcatggacgaagtatttgttgtcagataaatagtttttatcccctttctttttctgggttgcagcattgctttgatggtaggaaatccttcaccgtctatcgaaccgataaaagctgttttcagcttatcaatcatgttgcctactgttttttccgcgtctctcatcattttactttttattattggtttattatctgatgcgaaagtagagaaatgccaggaaagcaatgcaataaaaagaaaggtagaaatagcactttttacggtttgtgtactttacgatacaataacggagtttctcccgtatgctgccggaagctacggataaaataagaaaccgttgaaaaacagagttcaaatgcaatatcagctataggaaagtccgtataaacaagcagcctcttagcctcttccatcaccttgctctgaatatattgttttgcgctgattcccatggtcgaggttatcatctcattcagataattaggagtaatgcagagcttatccgcataatattgaaccgaatgttgctcttttgcatgtgtagcaaccaaattcatgaatttacttacatgattattggaaacttccctacttctgccctcctctatcgaagtcattttaaggtaagcacggtccagcaacatcaggacttcataaagcaatgctctcaaaacgtgtacatcgccctgttgatacgaatcaatctccatctttatatcatgcaaggtttcaagtatgcgtgtataaagctcatcagacaaatgtagtagcgatgaagaactttctatctgaaaaaacgaaagatgctgtacaaacaaagaatctttaaagaggaaagacaaaaattcttcttcgaaaatcagagcatacccattggtgatatgatgagtatcccagttccggatttcccccggtttagagaaaagaacgtcacgaggaattgcttcataggtttggttatcgactgaaaaagctcccttaccttctgttataaaagtaatatcataataatttagagtgtggacagcacttttagccaggaacttcttcacatacttcagttctactacatcgaccaaaagttcactcccatacttatgcttataaaaagtatatcgaggtattgagtttttcattcagaatacaaaaatagtattccttaccaaataatccaaagacttttcaaattcgattcgattgaataagccatgaaccatctgataaggaatacatagaaaaatatgtctaggttatatttcctatttagaacttccggccagatatcccaaactggtcacatctgcccccaagtaatgattaatgtgcttcaatggcaccctgtacagaatatccggaatttccgccaataaagagaggtacctttcccttactgtcagcttgcgggcattcatatcctcttcctctttaaagtaaaactgatactccatcagttgacggaccagattcgcaaatgaaattgaagatgcacacaactcttcaatctcctcttcactgatgtaataagcagcacatttcgtcagtgtcttgatagaatactgacttgaattatagcataacacagcatcacccgcagagaaaaaccgattggttctctcttctccttcatgagtggtatatgtatgcaaaataccggaaacaataatgtacaagctctgttctggcaatgtggcagaagcaatcgtttctcctttatccagatacaccatttccattcgagccaacagctctttcacttctctttcatccacctgatactcaaaacagagtttcttcaaataagcttccatacaaaatagattttagttaatatatgtcacttaaaaacacctaattcgacatagcaggcatcattgtgcctctcaaatataatttcctttgggtatatcgtaaataccagatacagatcaataatgaaacgaccgttgaaatgggtggagcaaatcccatgataaacagcgacgagctatctatctggctgaaccagtatgacaacggtatacggaacaggaaagtggctatcagactgtgaatcatcgggaataacgagtttccttgtccgctgaaataagaattaatgcagaacacgaaactaaccacgatgcagtcgatgctataccctcgcaaataatctgccgccattgccaccacagcagcatctttcgtaaagaaagcagtaagagtctccggcaggaattgcgaatacacgcaaaccgacacaccgaaaacaagagcaatcccaatccccgaagccagacatttattcattctcttgataagtcccgctccatagttctgtgcagtcatggttgccacagccgatgatatagccatcggaggcagcatagcaaacacgatgattttctcaacaacacccagggaagcagatgcaatgactcccatctgattgacaatgacagtgataatcagaaaagaaacattgattaaagcatcctgcaaagcaataggtgctcccaacaccaagatctttttagacagattccggttcaatcgaatatctttccgtgaaaagtcaaaatggaatccgtgccggtataagaaccagagcgctattccaaagctgactccttgtgcagttacagtagcgatagccgctcccgtagccccccaatggaaataaccgaccaatataaaatcgagcactatatttatcacacatgccagcccaacaaaataaagtggtgttttagaatcacccaatccacgcaaaataccacatacaacattatatcctactataaacagaatacccagagagcataccaaaatatagtttttcgtatctaccatcgcttcgacaggagtatgcatcagttctgctatccgactatgaaaaagcaccatgaccaaagttagcactacgccggttattgaaaacaaccatacggaagacccgatagtaaaagctacttttcgattgtctttagctccggtagcaatagcaatcagcactgttgtcccggtagtaatacccagaataatacctgtaattgtctgcatcacctgactaccaatagctacggctgccacacttgccgaatcatcatattgtccgacaacgaaaaggtcagctccgccataaagtgcctggagcacattggcaatcagaaaaggtactgcaaactgcaacaataccttcggtacgcttccttgtgtcaaatctaactctttcatagtttcttcgatacttttcctctttatcttattttgttacaacaaaaaaaagtgccggacaagcgaatgatttgcaccattcatcttatccagcactataattattattatagcaccctccgatgaggatttttatgcctgtccctatttcagggctgcaaatatgggctttgttttcataattaccaaattttaaccggtttttattttcttatgaagatgtaactagctatatatcaactattatcagacgaggtttggtctataggatctccgttagaaaaacgaaagaaagctgccaaccgatccggattcagcgtataacgtgcgcattcttttaataagggttccgcattcattacggcacaagaatgagaaaccacggacatcatcggccagtcctttaacgaatttcctacaactaaagtgtgttcagaagctaaacccaaagccttacataactgaagcatcccctcttttttactcgcttcaggatgaatgactgttatcagcggagctttatgaaagacctggcagggattttctttcaaccgggtaagaatagattctctctgttctttatcacgtaccaatatactatacttgtaaaccactccttcataactatgaatagtaacttttgacgattctccatatacctccggatatactttcaccggcaaacacttaatctgccgcgaataagataataaacctccatctgcaaacactcctcccctgaataaatcaaaaagagcctttcccagctttttcttcgcctgctccatcgacagagaagtggcaagatataaggaaacggactgtgccatatatcgcaaagcgttagcataactttctggaacttttccctgtgaatcagtcagtgttccatccacatcgaagaaaacagtcgtaataagtggcttgtccggtattcgccagaatgccccttctcccattattcgatgtaaagggtgattgttcaggttactaaatgcaatataacagtcacaaaccttcctcttgcaagataacggcacaacagctccatcaccttgataaaaattacctatcttcacccggcttcggggacaagcatacatatcccctttccaatcgataaaacaattatcccttcctcctgcgcaaacttcccattgtaccggagcattcttcaagtcatactcaaaaagattatccagttgactgaaaaactgaatatcttcctgacttaatggtgcccttaacccttgcatagcattaatgaataaataaatatccggcaaaagagcattccgtaaatcattgagtacgacctttgcagagggatttcctaccgctccgacacatacctgtattcccgcatgatggagtatatgaatctgatgcgcaaatttctctaccgaagtcatctcaggatgaaaactagcccaaagccttatcttacttatcacagtgggagccacacgaatctcatcaagccagtgtttagccggaaaagaaaggttagtctgacaggaaattccggtcacctgtggcaatgccgccaaatgcaccattcctttccgataataacgatggatcaatacttcaccgtaaggaataataaataactgcaacggctcccctttccattgttcaatagctgctataaaacgattccatgcctgttcatcctgtgtcgtatctgccagatgcgacttcttgccgaaaggacaataagaacaggtatagttgcagctattcaatttgccgcgataatatatatgcctgaaggaaagtaaagagctttcgttttccatttctatttcgttcaataagaataagtttccatcagttctcttatttcaggagtaatgaacaactgaccaatataatcggagtatgccattccgtcggaagtcagacaaatacgaccgttatccgtattttctatccattgccgttcagctaactgtcgaaacaacatcacattatccggtgattctccaaagcgacgcttatattcggccttatcaagccccatataatacatcagatttttaatgatgaaacgttgtcgccgttcttcctgagaaagaataaatccattacgagccactgtaaaatcagtagtgcccatataatcatctatctctccggcaatacaacgctggcaaacagtataccgggtggcataatgcaaattacccaggtaactgcgtccgccggagccacacgacagcatcacttcatccccacatgagatttccgcatcagtagacggatgatgaataaaacgtcgcatcgacgtttgtagaaaacctctgtctttcaacaaatcacaagcggcacaatacatctgaaaacagacatcgtcggattcccgctccgtgatagccgttcccggtcgtacatatagcggatagataaagagttcgttaggctgaaacagaagagcctgttccaatgaataaagaaagctggccacagtttgtcctctgattccgtaaatcaaatcaatattaaaaaacgggaattgtctcttccgaatagcctccagcgcctgattaatcatgtctcgccggggacgtcttttcaaagctgttaattcttcgtcaaggaaactctgtacgccaatactcacacgagctactcctgcttgcttcaacaagtccaaacgggtaggatcggcatattccggcgatgtttctacggaagtaaaggtatgtgaaggatgcactccgaataaggcagccgtatccaataggtattccagttgaggaacagtgaggagcaacggtgtgcctcctccaatggcgaaactatcaaatgccagtccggtagtgagtggagacaactgttgcgcctgcttgtgaagagtttccaaataagttgcgatataatccgcacgatttgtttgcagagaaaacaggttgcaatatccacatttatgactacaaaaaggaatatggaaataaagcgatgctttctgtccttccacctgtttcaggtaaggaaccagcgaaaccggggacggaaaagaacgataagcagttttatgtggataactatacatatagtctacatatcgtggtagcggttgattcattttttcgttaaaataaagtgtttgtaagggactgtataaaccgtttcgtgagatatgcaatgatattcatatccatcctctccatagcaagtgccatgatcggaaagagcaatcaccagcgtatttccccgcttctgaaaggcctgaaataaacggggtagctgactgtcgacatattgcagcgcggcagcgtgtgattccttatcatccttcattttgccttccacataatgacagttcggataatgaatagcagaaaaattgatatacataaaaatccgtttgtcctccggatagttttcgagtttcttcaatgcaaaatcaatttgtttttcagtactatcgggtgccgtgcatccaaaggtcggcagccaataacttttagtaaagtaaccgggaaacacacgccccagttcattacgcttgctgaagaagttcacccctcctatacaaatcgtttcatagcctacattggcaaggctttgcacaaaagttgcttccgtaaacggataacttcccgcaggcggaatacgtcccgtaccagcttgcacagggaaaaacaaccacttacggctgcgtagcgaatgaggttccgccggagaaggcagaaatcctgcaaagatggcaaaatgagacgggtaagtaaaatttcccggcgcatgtcttttttcccattctcctccgtgactgttcagtaccggtgttcttcctgcctcttcttcctccttgctgacatcataacgcaaggtatcaaagcaaagcatcaatatatcatgagtacccaccacctgattcatatccagatccggattttgggtctgttcgccagccggcagttcatctatttgcatggttatatctcttttttatgttttttatctgttgaatataaatagaattatgagcaaacatatcctgatacacatgatctccctgtccgttgacttctattatataaggaatatctgttcctctctctatcagtacatccactccggcatattgcaaatccaaagattgaaccgcttcctgacactgaaaatagatttgttgccgcactacttccggcaaagacaattcgttccaccaatgtgccttattgttcagatgcagattggttatgcttcctttactgcatctcacaacgatataatcaatttcagattcccggcacactacacgaagatcataattctctccctgcaactgctctttaggaatccattcttctaaaatagcttctgtttgcatcacagcttccgccaacgggatcatctctttttccgtactcaaacggttgatacgtttagtgttatgaatgactccatccacttgttgcaaggtagtatagactacccatttattccggttgggttgatagcgaacagccataatacctcccgcccccgaaccgtaacggggtttcaaaaagcatcctctaccgcaatcggcaagaagctctctcaactcatcaaaagaacggggagaaggtaacatcggagtcactttcaaccctctgtccatcaacacttgtttagtttcctttttatcaagagcacgtaataaagcatggggagtattcaaaaagcacacgtcatcagatagcctcatctcgcctaaacgttgcagtgtctccttatatgcctgattcaacagcgcatatttcaggaaattcgtttcatcgcttacacaaggttccagtttgataactgcctgccgtagttgcggcaagcagttaaaaagttccccgtaagtcataaaacgaacttccacctgcaagtgtttgcctgcttcaataaagtattctatacgtttggacagagagttgctgacaacgattatctgcatctcctattctgtaatcatcgggtaataccacaattcaccatcatattcatctgcctcttcagtttcagcaatatctattttcatagggagactctgcaactgtttcttcatctccttgctcaaataattatagcgcatattgataaacttcaaatgagcgatcttatccatattatccagcaataattgggcaccttcatctttgagagtaccagccgaaacatccattgtttcaagttggggaagaatatccgactccaggaacatttctacaatcttgtcctgttcttcagagttgacgatccccagataagtcagcttcgggaaacgttctttggagaacaacggacggaatatctcaatatcagcttcaaatccataatcttccacaccaacatatagaatcagtttttccagattggggaaatcagaaccaagaatatcttctaccacttcggtaggcaggccaccactgataatttcgagtgaccgcaactccggccgtgaagtctttcccaaacgcagattattggttcctttgattttcagatctttcaatttaggcatggcatcgagcagcggactaatatcagcttgttcaatccatgaaatctcctgttcttcctgctcaatatctccccagaacaagccttctatttgtgcgaacttctccttattttcaatcattccctgtaataaggcagaacagtcgccaccctcataatcccaacaaccgattgttatttgtttatattcagagagatgtttatctttcaatatcttatccagaagattcacattgttttcatactcatcataactcaaagtatatttcttggcttccactttcatttcacgtgcagtttcttcagcagtttctacatacccttttttggtcttttccgcaatcagtttgctggctgctttttcagcttcttcagtcgttgcgtagtttttcacttgtgtttgtccgtcggtccccaacttaccataatttacagtaatatctgttccgactacctctatgctccagaatttctgcgatttaaaatcttgaaaaacgaatactctcttcataatacagtttttaatggttgatatttgcacactcaacacagaacgcgcatgaacaatacctgcaaaaataaccattttatgtaatgtacaaagaaatctgtttactaaactttcagagtattcaaaaatacaacccaagatatgcaacaaaggctgccttttggggcagcctttgttattctatttctgtaatatatcagtttaatcttcaatagtacatatacttacacggttccaatccggttcagtaaacatatcgcctacaccctgaccttcagcagtgatacgagatgcactgattttatacttgttgaccaagatcgtttttacagcttctgcacgtgctgcggcaattctggcattcacttcaacactaccttccggagaagcgtatcccttaataaccactttagaatcagcatatttcttcaggtaagaagctacacgttccacattaggaagttgtgaagcgtcaactgacgatttaccttgtctgaaagtaatgatagattcgggtacacgggcggttttcactacagtctccaccggaaccacttttgtgcggcatgcttcaagttcttcctgcaatccgttgatacgttggtttgcattgctgatctcaccatctttgttgtttacatctgcacgaagtgcattgattgaagagttcagtccgtcaatttcggcttgattatatactctcactttggcaaaatgatgtgttccgttacttgtcttaaagtgatatgtcaatccggctgtcaactcaaaacctgcgttattagcattgaaacggctctttgtttcagggtaagtaccttgcatatcatacacaatggcaggtttgattcctaatgtccatgctttactttcacccaagttgaaattgaaattcaatcccaaacgcgtagaccaggagttctgatcgccatcgccattcacataataatgtaaccaacccattccggccacagcttccacttcaaacaaacgaggttcgcccgtgtaacttgcaaatagattcatcaaattgactttacccaatacgctgacatccgaagcatcgaaagccgttttactggatgtggtattgatatatcccattccttggaatcccaaaccgaagataggagttaattgctttgagactcccactccaaaagtgggacgcatacctttaaagaaagcactgtgagtaaggggagtaactccaccggcatttactccgacagaccaattatctgtaagtttggtaccttctacaactgattgggcatttgctactgtaaagccacccaatataaaagctaataaaataatagattttctcatattcataagttttaaatgtaatgttttatctgctaaatcattagaaatgtattgtttgttcatgtctaactttctagttcattttttaattcgttattcactttaaacaacatatcatatcaaaaattagttcgcaagccatgagccctattaacatctattatgctttcgaaaaatctaaaatatggaaacatcaatgcaaacgcctcattccctgaagagaaagggatcccaacatcgctaaccattatgcatcttgtttcattattctacactttcattcatccatcaggcaggaaatacataaaccggactctactaaaatacgaagaatagaacataaacggaaagttatcaggttgttaatgccatatatcgttctgataaagagcgaatatttttcttccttttcaattggaatcttgatttaatttctaactttgccgccaacatcggtttccggaatggcattatcaccagacggaattaaaagggaatccagtgaaaatccggaactatccccgtagctgtaagttttatctctctcataaaaaagagaaatgttatggcattcatttgccactgattcatgaaacggatcgggaaggcgccacaacaaaaacaagtcagaagacctgccgataaaatttccgttattccaggctttcgggtgaaaggcaatagaacgaatcgtacaggtccattttattacaagtctccagaaattgtcgtgcatgaataactatgtaggcactaaatctattttgttaattcttaaaatataggtatgattagttcggagatattcattatcaaaagagacggaaaaaaagaagctttttccctcgacaaaatcaaaaatgccatatccaaggcatttttatcagtaggtagttttgctacgcaagatgtgataaccaatgtgttaagccgtgtcagtatcagtgacggaacaaacgtagaggaaatccaaaaccaggtggaagtcgccttgatggcagaacattattacagcgtggccaaagcgtatatgctgtatcgtcaaaaacatttggaagaccgtgaagtcagagacaaacttaaattcctcatggattattgcgatgcttccaaccctgccagcggtagcaagtacgatgccaacgccaatgtggaaaacaagaatatcgccacgctgataggagaactgcccaaatccaatttcatccgcctcaaccgccgcctgctgacagaccgtttgagggatatgtatggtaaagaggcttccgaccgttatttggaactcctgaatcatcacttcatctacaaaaatgatgaaaccaatctggcaaactactgtgccagtattactatgtatccctggctgatagcaggaacaacagcagtaggaggcaattctaccgccccgaccaatctgaaatccttctgcggaggatttatcaacatggtatttatcgtatccagtatgctaagcggcgcatgtgccactcctgaattcctgatgtacatgaactatttcataggtttggaatacggacaggactattataaacaccctgataaactggcagacttgtctctgaaacaaagatcgatcgataaaatcatcacagactgtttcgagcaaatcgtatattccatcaaccagcctacgggtgcccgcaatttccaagcagttttctggaatgtggcttattatgacaagtattatttcaatagccttttcgagcactttgttttccccgacggaagcaaacccgactggggttcgcttagctggttgcagaagcgttttatgaaatggtttaatgaggagcgtacacgcaccgttctgacattccctgtagagacaatggcactcctgaccaaagacggcgatgtactggataaggaatatggcgacttcaccgctgaaatgtatgccgaaggacattcattcttcacctatatgagtgacaatgccgactctttgagtagctgctgccgtctgcgtaatgaaatacaggacaatggctttagctatacattgggagccggaggagtctctaccggttcgaagagcgtgttgaccatcaatctgaaccgttgtatacagcatgctgtaaaatcaggtattctctaccctttcttcctggaagaagtagtagacttggttcacaaagtacagcttgcctataatgagaacctgaaattattgcaggcaaagggtatgttacctttgtttgatgcgggttatatcaatatgagccgccaatatctgactatcggcgtgaacggactggtggaagcagcccaatttatgggaatcgacatcaacgacaatccgaaatacgaggcttttgtgcaggagattctcggcatgattgagaaatacaataagaaatatcgtaccaaagaagtacttttcaactgcgaaataattcctgccgaaaatgtgggtgtgaaacacgcgaaatgggacaaggaagccggattccagacttaccgcgaatgttacaacagctatttctatattgtagaagacaaatcgctgaacattgtcgataaattccgcctgcacgggcatcgttatatcgagcatctgacgggtggttcggctttgcacatgaatctggaagagcatcttagcaaagagcaataccggcagttgcttcgtgttgccgctaccgaaggttgcaactacttcacattcaatattccgaatacagtatgtaacaaatgccatcatatcgacaaacggtatttgcatgaatgtcccgaatgtcacagcgagaatgtggattatctgacccgcgtcatcggatatatgaagcgtatcagcaatttctcccaagcacggcaaaaggaggccgatttaagatattatgctccggtacgctgattatgatattgtttttcaggagataccggatgaggtgacattagccatcaacctctccaactgccccaaccattgtaaagggtgccacagtgcatatctgatggaggacgtaggagaaccgttgacggaagaaagtctctctaccctgctcggtaaatatggaaaagcgatcacctgtgtctgtttcatgggcggtgatgcttcacccgcagaagtggaacaactagctgcttttttacacaagcagaccatcactccggtaaaagtcggatggtactccgggaagagcaaactgccggagcactttgatgtatctcatttccaatatataaagttgggaccttacatcgagtctctgggaggattaaaatctgaaacgaccaatcagcggttgtaccacatagaaaatggaataatggaggatataacttatcgttttctcccccatcattccaaaaagatttcttaataagagaaacgctcaaacggagtatgtcatatttaccgtttgagcgttcttttttctaactacttcttttcattcgtatttatgatttcagtacccgcttcaatctgtttaatccttctatcaaccgctgtcgcggacacgcaatattgatacggataaacccttcaccagtctctccatacagactgccttcgttcacccaaagtttttctttcttcaacaagtcttttactatttctgctgacgtttgattcaagaccgagcaatccacccaaaccagatatgtaccttccaacatcattacgggaaattccggaagatattcatcaaaataaccttttaaatagatgtaattcgcaaacaaatagattttaagttcttccagccattcttcgccctcattgtaagcagccatcaacgcctccactccgaaaggattcacatcacatacctcatttatattaatcgctttatctattctcacccgtacatttgcatctgcagaaataatattggctatctgaagccctgccagattaaaagccttgctaggcgaaacaaaggttaccgaattcataagaaactcttctgatatagaagcgaaaggagtatattcatgccccagaaaaaccaattcacaatgaatttcatcagcaaccacaaacacattattccgaatacaaatctcacctatccgccttaactcttgtttgctccacactcttccggcaggattgtgcggattacataacaacagaagtttgaccttcgggtctgaagctttccgctccaaatcatcaaagtcaatctgatagcccctgtttctatataccaaaggattggcaatcatctcgcatccgttattacggatagaggagaaaaaacagttatatacaggtgtctgcaccattactttatctccgggcagtgtcaacgctttaataacagcagatattgccggcacaacaccggtggtgtaaataatccactctttttctatccgccaggcatgtcgtcgaacaaaccaatttacaactgcctcgtagtatacatcaggtacacgtacataaccgaaaatcccatgttccacccgtttcttcagtgcctccacgacagggggagccgtacggaaatccatatcagctacccacatcggcaatacatccgcatcttcagccgaatcccatttataagaattcgttcctctgcgtggaataatttcatcgaaattatacttcatatttcaattaaaacaggttagatcgtcccaaagtttcaattcgcaatttgctggtgatttaatattttcgtccaaaatgattgctccgaaactttcggcaacaatacttcccgtacgaggattttttacgctatgaacgggacttttaatcgttgccttcacactactgtattcaaaagcaaggtcagcatcttctgccatcgtacaattttccatcaccaaatcatgtgcgtagcaaagcggttgagtccccgaaatcctgcaatttaccaaacgtaagtttttagaatgccatcccagatattctccgttcaactcggaatcatagactgttacattttccgtattccagaaagcatctttggagttgataactgcattatggatttctacattcttgcaatattggaacgaatagttcccgttttgggcatagttttgtatcttaatattctcactgtgtataaaaaggtaatccgctttatcaatctgtacgttcttcagctctatattatgacaataccaaaacgtttccaaagcattaggcaactgcacgttttcgagttttattccgtccatttcacggaacatcttcggtgcttctaccaaggtatctgccatttgcagactttgagagtaccatagagcagcacgggctccctctgtaaagagacagtttttcacaatgaatccgttggtatgccaaaaaggatattttccttcaaagcgacagttgattgctataatattactacattctttcaatgcagattcaccggcgtgaattgttacatcttccagttgaaggtcgtgggtcgcgaacagaggacgttcgcctccatattctttatttcttatttgttccattagtttattctttaatctgttatttcaaaagttacatttacgcctcctgaaccaagggtggaggccagtcctgaaggatttgttatacgtcctaaacgggtataagtatatgaagtggaaaaggtttcataaaataggaccacacaagtggaaccgtaaagcatcaagtcacctgtccgaatagtcccgggattggacgacgctgtcggcaaaccattcgacagataataatatttttcattaccatgcagttcggacatatccactgtcatagggagtagtctcttaaatgctttcgctgtctcattattttccaatgtggcattgaatgaaacaggtccgattgttattttaagattattgctcactggggtatcatcgttattgtcgtcattatcatcgggattattgccattattgttactgccattatcaccggaacccgaaccattacccggagtcacttgttgacctgttccctgtataggttcatcttcgctacatgatgcggaaccgaccgataatgtcagcatagtaagaattgctattatatagtatctcatatttatagtattaaaacttatttctttagatattccttaaagaaagattccagtttattaaatggaataaggctcacacgatcgtaaagatctacgtgtccggcaccgggtactatatacagttctttaggttcggcggccaatcggtaagcgtcttcactaaattcacgtgagtgggcattttcaccggtgatgaaaagcatagggcgaggtgaaatagtctcaatatcttcgaaaggatagaaattcataaatttcacattacttgaaagtgtaggatgagtggtggtcataggagttgctccgtcgggggtaaattctcctctttgtgtacggtagaactcatagaactcccgttcaatcggactggacttttctgtcagttgatgtacagtaccacctgtatatttagtttctccacctaaaaattcagcataacgctgttctgccgcttcagccattatttgctttctctgttccaatgtcaatgagtgttttaacccattacggctagccgtacccatattgtacatactgattgtcgcaatggctttaaggcgagggtctattttcgctgcactgatagcaaaacttccactgccgcaaataccgattactccaattagattccggtcaacaaacggacgggtacctaaaaaatcaactgcggcactaaagtcttccgcataaacttccggcagaacagcattgcgcggctcgccttcactcccaccccaaaaagacaggtctatggagagtgttacaaaaccccgttcggccattttcgttgcgtaaagattcgcgctctgttccttgacagctcccattggatgtccgacaatgattgcagggtatttgtccccttctttcatattcttaggcagaaacaaatttccggctaccttcattttatactggttggaaaaagaaactttctccacacttaccaaatcacttttataaaagttatctgcatctgtctgtgcagaagaaaaactagttccaagcatcatcataaatacagttgttaataataaaatccgtttcatatctcttatttttaattattaaagaattgattgtctactttctacattacaaaaatacgatgaaagaaagagaccgtttgtagatgaattactgacataataaccccaattacggattatatttttttattattctgttacaatattgatattaacctgcttccggatatgcactacgcgaacccgcagataaacgaatacaatactcgcaatcaggaaaagcaacgagccgaaaacagaatatcgtgtgcccatttccgtaataaaagttccgcatatacctgtaccaatcgttgttcctaaattggctgaagtcagaaacattccattggcaaagtctggagcttcgggagcggcatctgttatcatatattgcatattattacttgctatacccgccaatacgcctaaaataaggatgacaattaccatagctccaatccattctccaacaatgaacagacagatatatgaaaccaataacgcaaaaggcatgaggataattgaacgcctggcgtttattgatagcagttttcccgccatcacattacccacaatatttgccaaaccatatacgagcaacactgcacttatcacattatatgagacctccgttacttttttcaggtaatccgacatatagctaaagaatccgaacatagctccattaatcaaggtaacagcaataattgaataccacatcgttgttttcttcaatacgctaagctgtgcaccataagatactttttcttttacaggcatggaagggataaacagaatcgtagcaacaaagactaatgcgtttacaacagtgaaaaacaacatcgccatggagaacgaaacttcgctggcaataaaactggtcaccggaacgcccagcaccatgccggcggacacaccgacaaagactttagaaacagccttgggagcctgttccttgctgacagacgccgcggctaccgtaaaagccatagagacatataccggatgcaggaaagcgggaagtatccgtgcaatcaacaatactgtgaaattagaggtgaacatggatattacattacttattgtaaacaatcccaatgccagcaacattactttcttccggttaatccccgaaaataataaaggtgtcgcaggggctgacgcagccaccaccaatgcgaaaacacttaccgtccagccggcttgaggtacggaaacattaaaagttgtggctatcaagggcaggatccccactactcccatttcggtgtttataattccaaatacaccgaccgtaaggataaagacgagcaaaccgcccgaattgagttttaatttatttttttgttccatagttactatatgctatttataattccaatcccattttataggcgttttcaagatgtactttatcaatctgccgtgccagtttctcgcatccggtacaaccgccggcacaatataatcccacttcattccaacctaacgcctgattgagaagacgaaaatatcgtatgggctgttcgaaggtcgtatcattatcatcaccggctgtcatcagcaataccgaatctttttgaggatatttatcatcgacagaaatggcataaagtctatcaatgaacgatttcagctttgccgtgattgtccaaaagtaaagaggagaagccataaccactgtatcacattccgcaaacaaaggatatatatcctgcatgtcgtcgcgaacagtacactgatgtgcaagacgctgacaaactccacatccccggcacccttctatccgcatactacccagataaaccttcgtcacagaatgtccgcgctctaccaatcctttaatgtatgcatcggtcagtcggtctgtattgccgcgttttgtgcctgcactcattattacaagtatctttttcatatttccctgatgtgttttatcgattagcgaaggaagtgaagtgtctgtcgtttctttactattcaaacaccgataaatagtcgtaccacctaatagtacgcctccggttgttagtaacacgcttttcaaaaaatgctttctatccatattctctcatttattaatttcctctgattcatcaagttttatttaacatggcaaaggtcggaagaatataaagaagccgttgtagacggattacgggtatgataaccccaattacagattagtcatttccctactatgaaaacagaacatttatctgtatctttgttaccgattccaaataccaaaagccatggataaagttataaaactagagaatgtaaatcagtataacgaactgtacggactggaaacattgcatcctttggttagtgtcatcgacttgaccaaagcaacgaaaacagttaaccatatccagatgaactatggtctttatgctcttttcctaaaagagagcaagagctgtgacattaaatacggtcgtcagtattatgattaccaagaaggaaccattgtctgttttgccccaggtcagacagccggtgtaagtaccattgaagatgaaatcaatccggctgtttatggtattattttccatccggacctgattcgcggcacctcacttggaaaagatattaagaaatatactttcttctcttatgcagtaaacgaggctttacatctttcagatcaggaaaaggaaatagtcatggattgcctgaagaaaatcagtatcgaacttgagcatggtatcgataaacatagcaaagcattaatcgccatgaatatcgaactgttactgaactactgtatgcgtttttatgaacggcagtttatcacccggaacagtgccaataaagatgctcttacaaagtttgaacaacttctggatgaatatttccaagatcaacttcccatacaaaacgggttaccttccgtgaagtactttgctgataaagtctatctctcccccaactactttggtgatatggtaaaaaaagaaacaggaaaaactccacaggaacatattcagaccaaagtaatcgaactagccaaagaacgtattgtcgatacgaaagaaaccgtcagccagatagcttattcgttaggattccaatacccgcaacatctctgcagattattcaaaagacgcgtcggatgcacgcctaatgaatacagaaatcaggctttagcataaaaatatagtccctcaaataagggaactgtaatataggtaaaacaatccgtaattcatatacaaacagatttcaaatcctgctgtatctttgcagtgtcataaagaaataagtaaaaacattatttagaaaaactgtttgatatgtatttagaaaatatttattctcctgcagatgttaagaaactgtcggaaaaagagctaaacgaattaggtggagaaatccgtgcagcgctcctgcaaaaattaagtgagcatggcgggcatttcggacctaatttcggaatggtggaagcaacgattgctttacattatgtattcaattcgcccaaagacaaaattgtatttgacgtatcgcaccagagttatgtacacaagatgctgaccggtcgtaaagatgcgttccttcatccggaaaaatacgacaacgtatcaggttataccgaaccgcaagaaagtgaacatgacttcttcatcattggacatacttccacttctgtcagtctggccagcggattggcaaagggacgcgacctcacaggcggcaatgaaaatatcatagctgtcataggcgacggctccttaagcggaggggaagctttcgaaggactggattatgcagcagagcttggcaccaacatgattattatcgtcaatgataaccaaatgtctatcgctgaaaatcatggaggtctatacaggaatctgaaagaattgcgtgacagtaacggtcagtgcgaatgtaacttcttcaaggcgatgggactggactatatatatgtaaatgacggtaacgatgtacaggcgttgattgaagcattctccaaagtgaaagatattcagcatccgatagtagtacacatcaacactttgaaaggtaaaggttatgcatgtgccgaacaagataaagagacttatcactggcgcactccattcaatccggaaaccggagaagcaaaagtcagttatgaggaagaagattacagcgaagtaactgctcaatgtctgctgaaaaagatgaaagaagattctcgtgtggtgacaatcacttcgggtactcctgccgttctcggattcactccggaccgccgcaaggaagctggcaaacagtttgtagatgtcggcattgcagaagaacacgcagtagctcttgcttcgggcatcgcagccaatggcggaaaacctgtttacggagtgtatagtacatttatccaacgttcatacgatcaactttcgcaagacctctgtatcaataataacccggctgttttgttggtattctggggaacactgtccggaatgaatgatgtaactcacctctgcttcttcgatattccgctcatcagcaatattcctaatatggtttatctggcaccgacttgcaaagaggaatatcttgctatgctagaatggagtatccgccaaaatgaatacccggttgctatccgtgtaccggcaacagatgtaattacttgtggggaaccggtggagactgattatagtgttctcaatcgctataacgtgacgcatcgtggagcgaaagtagccattcttgctttaggttcgttctatggattgggacagtcggttgcatcacttctgaaagaaaaagccaatattgacgcaacactcattaatccgcgttacatcaccggtgtagacaacgaactgatggatgaactgaaagcagatcacgaattagtgattacgttggaagacggtgtattggatggcggtttcggtgaaaagattgcccgttattatggtgctacaaacatgaaagttctgaactttggagctaaaaaagaatttgttgaccgatatgatatacaggagtttctccgtgccaatcatctgacggatgaacagattgtagaagatatcacagcagtgatcggttaaaatcagacccattcactatatattcaggtaggttgatgtatacggtctttaaggacagttgagttgcatcaacctacttccatttttattcaaatcagccaacttattatttagattcattatattcactattcagttcagtaattccccattcagttcagcaatcctttccgttcaaatcaataatcctttccgataattcaacggagtctgtcccgcatttcttttaaagaacttacaaaaaccggctgcatcactaaaccccagtttagcagcaatctcgccaaccgtaaatttggtagaactcaataaagtacgcgcttccattactaacaattcattaataaggctattgatagtcttacctgttccaagacgtacaatgcgtgccaggtactgttcactaatagccagtttatccgcataaaagctcacgaaatgttcttccctgaaattacgggtaacgagtgcatgaaattcttgcagaacgtgatctttacgactgatctcttttttgataacggtctttcgggaaagaaaatctgctatatccaaaaacagagaattgcacgctgcctgtatacgccggaaaaggaaatgatgttcaatattcatcagatgcatcaatacttccagctccttatggatgatttgagcttcatactctgtcaactgaatcgtatattgcttattccgcctcatggttgccaacaggattgccgtgatttgtgtcagatatgaatcgtccgtccgcatagattcggaaagggcgagagtgataaatttaatatcccggcttgaataaagatgttccgtgagataatttgctccgtgaataagtaacatattcggttctatcgcaataaactctccattcagtagaatttccgaacggccttcaagaacgaatatcatataaagctcccgattgaaataacattcatttgccggataacttctatctttatattcactccggaaacagactacctcctctttataatgaggaagttcaggatgctccttcaatagttgcgtattatcaaatatacgagattttaccatttacacctttattttatgacgtaaaaatacgatttgtttcggatatgacaaaaactgtatggaattagataatctatttcagagtaaaaaacaagacctttgcatatccttttcaatacatgaaaaaggaatcaatagaaagaggttaaaaagacatggaaatgaaagagatttttaagaggtatttagtgtttgttatcggactctattttttagcggcaggtatcgtgttgattatacgctcggcattgggaactactcccatatcgagcatcaattatgtattaagcctgaatagtcctttatcgttgggtacttgcacatttatcatcaacatggtgcttatcctgggacagttctggttaatccgaaagaatagaacccgacaggatattattgaaattcttcttcaactaccgttctcttttatcttttcggcattcattgatttcaatatgatgctgacaagcgaactgcatcccgctaattatggtatgtcgattgctttattacttacaggatgcatggtgcagtctatcggagtagtgcttgaactgaaaccaaaagtagccatgatgagcgcagaagcatttgtgaaatatgcatcccgccattataacaaggaatttggaaagttcaaagtttattttgatattactttggttacattagccgtgattctctcgctgctgctgactcaaggtattcagggagtacgagaaggatcactcattgccgcttgtataacggggtatatcgtcagcttcctgaatcagaagataatgactagaaaaaccctccatagattactgccggtctggaagtaagccctatatctatttaaaataaacgccttataaaaggagtcatataaaaaggtcaatataagaaaatcactataaaagaaagtcgcttctctgttagaatctgattgattctttcaaagaagcgactctttattttagatataattatactcgtatttacttcttctgactatctatctctttcagaagttcatccacagccacctttagttgggtatcctctcctttgactactgtttccggattattggcaacctttacatccggttccaattgggtattttccaaataactgccgtcaggcaaacgataaccgacgataggaataccaaagaccagtgaaggatcttgtaaagtttcccaagacacacttgtcatagtacccggaacaggcataccgacaagtttgccaatcttttgatgtttatatacccacggagttccgtgtgcattcgagtagttggcctcacattgcagcataatggaaggtttgttccaacgacgactcggcatatcacaggcttcacgtccgcgtaccacctgtgtgaagtatttctgaccgctgaacagtatttcaatatcttcatgcagacggccaccaccgttgaaacgggtatcaatcacaatgccttcgcagttgttatattttcccagaatgtccgagtatacagtacggaagctgtcatctcccatcgactgaatatgaacatatcccaaacgtcctttcgaccatttttcaacatctgccgcacgttgttttacccaacgtttgtataacaatccattcagttgcccgttggtgaccggcatcaccacttcttcccaacgctctttattttgtggattgtagattgaaatcaatgttttcttccctgctttattattcagcaagcaggttatgtcattatcgagagttatctcttctccattaatcttttcaatgatgcaaccagcctttactttggtacgtgaatgatcgaacggacctttttctattatttcagcaatctgcattccttttccctgataattccagtcgaacaagagtccgagattagaagtgacatctccttttcctttgggagaataacgtcctccggtatgtgaaacattcagctcacccaaccactcactcaataattctgcaaagtcataattgttatcaatatgaggcaagaacttacgataagcattagtcatagcatcccagtcaaccccgtgcatattgacattgtagaagcgtttttgatgctgtttgtacacatggtcaaacatcgtttcacgttcggcagccaaatccattttcatttcagcctgatagctgatggacttcaacgcatccgacttggcatccatcttttgcataatccggcttcccaacaaaaagatatctccttttttgtccaacatcaacgatgcccaaccggtattgagtttgtgcagacgcttcgtatctttttcacggagattcattttccaaaggtcatatccaccttcgaacgcggagaaatagtaaagatcttccccgtcttttgaaagtatggcactacccaagtcggaagaattgggagtcaaacgtacgatacggtcttcaatgccgttcagctcgacaagtatctctttttgatctgccttatcatcagcagactcatcctgattactgtctttgctgctatctactttgctcttttccttgtcggccttgcttttatcagtctttcccttgttagcatttcctttatctgctttttccgccttagacttctttccgtctttcgtcttctcatcgtctttctcctttgccttcttctgttccttttcaaattccttgagtaattcgaaatcttccttactcaaacggtaacgatcataagcatcctgattgagaaacaccaacatcacatcttgctgcgatccccaggaagcgtgcgcacgcataccatagcgctcggtttggaaaagaatagcattcccatcgagtacccaacgcggagcaccactgatatatccactatttgtcagattagtaattgcacctccctgtgcgctgacaatgcctacatccgaataaggatcgtggcggttgcctataaattcaagagtgaaccatttaccgtcaggcgaccattcgtaatcgaatccacctccggtgttataccatgtagaaccatccgttacctgacgtaccttttttgttttcaaattgagtaccatcaaacgattacggtcttcgataaaagccaattctttaccgtccggtgaatattgcggataagtacgttctaccgttttagacggtaataatacttcctcttcaataagagtggcattagggaaattcgggtcttccttacgacttattttggcggtataaagttgccagttaccggttcgctcgctggcataaaccagtgtccggttgtccggagcaaaagaaacggcagcttcttttgccggagtatttgtgatttgcttggtggtagcataatcagttgaagtcacaaacacatcaccacgtacaataaaagcaatttgtttaccgtccggagatacagaagcggaagttgctccctgcgagaatttaagtgtagcaagctgctgttcatcatcacgaacaagttctacttttactttttccggacgtgcaccagacttctgtgtgtataactcaccatcataggtataacataaggtacctttatcgctgacagacaaaaaacgtaccgggtgagttttgaaagtagtcacagctttcacttcctgtggggtattcaaagggaaagtatacacattgaaggaacctccatcacgctcacttaaaaaatagacagcattagcatcaggtgcatacacaggattacggtcctctcctccccggtttgtcaggttcgtatgttttcccgtttgggtattatataaccagatatctcttgtaatggaagaagtatgatgctttctccattcatcttcaaaccctttacgatcctgataaagaaagttcttccctgttttatcaaaacagaccagttcggcaggagtgcccagcacttgctcggtacgtccgccggcaacaggaactttatataattccgtcatcgctcctgtaggaaacagggcactgcttgccggatcctgtatagaggcagagaaaaagacatactttccatccggagtaaaagccgacggtatttctgatgcagaatgataggtcagtcgccgggcggcacctccgtcagcaggcataatgaataagtcaaaatttccattccggtcactggcaaacgcaatttgcttgccatcgggcgaccaaaccggattggcttcataagaggtttgtgtggtgagttgaacagctgttcctccttgtgcagggactttataaatgtcacccttgtaacaaaaaacaatttctgatccatccggtgatatacgtgcatcacgcatccacaaaggagtaattgcatagctggataatgctgatagtaccagcgctaaagaagttattagtttcctcatatcaaattattataaatttattccgataaatcggtttgaattagttttcccgtgtaattataaaatgtgctgtcaccaaagtccttgtaaaagaaggcatatttatccactcccgtacaatgacaaacgccaatctgtcggggaagatattcctgtaaataatctgcaatgacctgatatttttgtttttccgcattatggatatgaaaacctcccagaagtaacttacaaggagattcgggaaaggcagcctgaaccgtacgcaaaatattggttattccccgatgagaacaggcacttaatacggaaaatccttctggttccaccaataccaccgccaattcatcctgaaaagtatccggtattttgcatccatcttcttgctgaacccaaaaacgttcaaaatgggtatctgcctgatttataatatcaatagagggaaaaaggaaaactccgggaagcagttcggtctgctttgtaataaagcggaaacgggaacgatcgaggttttgtgtatgcatcatcccgttctcacgttcatccttgaatttaggagaaaaaatctcacgcttacagacaacggttgcctgcgtattcaattccaaaaaataacgtagtccgcccgtatgatcgctatgaccatgagataatatcaaataatcgactttttgcaagtcaatatgcaacaagcgggcgttacggataaacaagtcggatgctcccgtatcgaaaagtaaccgatgtcccgatgtctcaatataaagagaaagaccatgctctgcctgcaatttacgtccatagacacaattctccacaagagtcgttattttatagcccatgacacttagttagttatcaaacgaattagacaaaataaaaagttctgccacaaaattataataattctgtggcagaacaagcaatccagtcaattaagtaatcgtaaaaaggggaaaaaggtgagggtagtgagggaggaattgcaaccttttatttttatattttattttttcctatctatattttctctaaaaaaaaacacgaatgttagaaatcctccctcactaccctcaccttttcccctcttcttgtaaaaaaaagacggcggaaaatctggaaaacataaccgtcttttccagatttcccgtcaggttttaaaagttaagttcgaaactatatctcaaatattcgaacaatccattttatcatattctttatgaatatctttaatatggaaaacaaacagttacaccatctttcccatattatatgcttcctgcatgtagggagtatctttaatctctcctactttccatgcaccgattccatagaccgtccctttttcctgtggtccttccaagcaatcgaggaagccacggaagccgtcgatagtacgctccatcattgctttatcgttttctgctgccgcaataatgaaataaaattccttattggttatttccgtataacgtgcgcaacaacggtcaatcattatcttcatctgcccgcacatggtgtaaaaatagaccggggttgccattacaatcacatcggcagcaatcatcttctccacgatttccactgcatcatccttctgcggacaaggtttaccgtacatactgcaaacactgcatcccgtacaaggatgaaccgttttgtctttcagaaaaatcttctctacttcattgcccgcctcaatagcacctttcataaattcatcacaaagcaaatccgaattaccacctttacgtggactggacgaaattatcaaaacttttttagccataactttcttttattactttttattttcagaattaatcagtcttttcactctgcaaaaatagacaatttataacatagcgaatgtatataaattacagagaaatatacccagattacagattcaaacataacaaaagattttttctaccaatatttaatttatatctttgtccacaatacgaacaacatgatacaatgaaaaaaatacaactgaccgacacacataaagaaaagctgtttcaaatcccccttttccggaatttgcccttaaacattaaagaatccctattggagaaactagatttcgtagtctatatagcaaacaagaaagagatagttgttacgcagggaacgccttgcaacaaactgtatgtgttgttggaagggaaattgcgcacggatattatcgacggactgggaaatgaagtgatgattgaatatatcattgcgccacgcacttttgccactccacatctttttagctcggacaacacattgccggctactttcactgcccttgaggacagtgtgatacttatggcaacaaaggattctacctttaaagttatcagccaggacccgcaagtattgcacaattttctctgcattgcaggcaattgcaatatctgtaccgtatcacgtctgaaaccactctcccgcaagactgtccgggaaagatttatcgtttatctgttcgagcacaagaagaaagattccctgatagtggagattacacatacgcaatcccaacttgccgaatacctgaatgtatcacgtcccgccttatcgaaagaaattaataagattatcaaggaagggcttatcactatggaagggaaacgggtggaaattttgaataaggccgctttagagaaattcatataataaagaaacaggggcagggttgaaactaaggaataatttagctcttatatcgaaaacaagttaaatatataaatgagccgaagagaaataaaactgtttttgctatatttgcaatcagaaagaaaagcaaaaaaatatgacagatgaacaattagggcaaatgaagcttatcttcaattacaacgatgtattctacagcttcttctatgatgacctcagcggctgcgtacatcgctcccgcgaatatgccatcaattacgtctattcgggtgagatgattctcgacaatggcaatgagcaaattcatgtcggaaaaggcgaatgcgtcttcataccgcgcgaccatcacattacgatgtacaagaagacgaaagatggtgaacgctactgcggtatcttcctgatgttcacacgtcgtttcttacgtgaaatgtacggtaagttggaacaacgtaaagtaccgaccaataccgcgaaactcaattccggagtgataaaacttccgaaaacggccgaactcgccagtctgttcgcttcgatgacgccctacttcgatccgaaggtgaaacctgcggatgacctgatgcaactgaaattgcaggaaggtctgctcgcattattacatatcgacaaaaagttcgcgccgacgcttttcgacttcaatgaaccgtggaaaatagatattctggaatttatgaacgagaactacatgtacgagctcacgatggaagagatggcacactacacgggacgcagccttgccacattcaaacgggatttcaagaaaatcagcgacctcactcccgaaaaatggcttatccgtaaacgactcgaagtagcttacgccctgatgaaagagggcggcaaaaaggtcgtggatgtttatgccgaagtcggtttcaagaacccgtctcacttctcaaccgccttcaaaaaacagtacggtatgccgccgaccgccacattcgtgtaaatcggagcaaaatatattgagttttttaattaaattatttaagcctcactgcgacatcgcagtgaggcttaaatatcaacttacagcttgttccttacagtaaccttacggtaagggcagccctgataatttaccggaaaatatagagcatacaatcttcatagcaatgtgtatgctgatgccatattgtccaccgccaaacttgattatcataaattcagaactacttttccagccatttgcatggagcttttaagaaaatagatagttgagcttttgagtaactccttttgagcccgacaataatgtgccgcttattttatagccgtacctttgcaatatgaaatagaacaataaccatttaaataatagaatgatgagaacagcgaattttaaatccgcagctatcgcagccttgttaagtatggggttgcttaccggctgcacgaacggtattacaaatcaaaaaacaagtaatcatatggacacattgaatcttacacaggaatgggacaaaaagttcccacagagcaacaaggttaatcatcgtaaagtaaccttcaaaaaccgctatggcatcacacttgccgccgacttgtacgaacccaagaatatcgaaagtaaagtccctgccattgccgttagcggccctttcggggctgtgaaggaacaatcatcgggactttatgcgcagacaatggccgaacgcggattcctcacccttgcgttcgacccctcttatacgggcgagagcggtggcgaaccccgtaatgtggcatcgcccgacatcaacaccgaagattttagcgcggcagtggatttcctgattgcacaccccaatgtagatgccaaacgcatcggtatcatcggcatctgcggattcggtggtatgggactgaatgccgcggcaatggacacgcgcatcaaagcaacagtagcttctacaatgtacgatatgagccgcgtgaatgccaacggctatttcgatgccgaggacagtgccgaagtacgccgcaacaaacgcgaggcgatgaatgctatccggacccgtgatgcacagaacggcacggccactcccggtacgcccggtctgcccactagcatcaagggcgacgagccgcaattcgtcaaagactacttcgattattacaagactgaacgtgcttttcacgcccgtgccatcaattctaatggtgcatggaaccccacgatggctctttcgttcatcaatatgccattgttaacctatatccacgagattgataatgctgtattgctcattcacggcgaaaatgcccattcgcgttatttcagcgaggatgccttcaaacgcctcaagggcaacaacaaggagttactaatcgttcccggagccaaccacaccgacctttacgaccggaagattccgtttgacaaactggaagcatttttcaagtcaaacctcaaataaaataaaaacatgagtatatcaactaaaaataagcataaccacttgttgatgttcatcctcacactcggagtattcggaatattgaatactgaaatgggagtagtgggcatcatccctatcattgccgaaaccttcggtgttacggtgccggatgcgggttggacggtcagcctctttgcgctgatcattgccttctctgctcccgtcgtaccgttacttttttcacgggtaaaccgtaaaacggtcatggtgctcgccttgtccgtgttcgtgattttcaacctcgtttcggtcttcacgacgaactttaccgtactgttgataacccgtgcgattccggcattctttcatccgctctatgtatccatcgctttctcaaccgcagcctcttccgttagtcgggaggatgctccgaaagccgtttccaaaatctttgccggagtatcggcaggaatggtgctcggagtgcccgtgacgagctacatcgccagtgaattttcattctctgcagcaatggtattttttaccgttgtcaatgcatttgtactgctcgccactattttcctcataccgtccatgcccgttaaggaacggttatcgtatggcacacaactcagcgtattgagaaagcccgtattgtggaactccttccttgcggcattactgatgaatgcagccatgttcggattttacagctacttgtccgattacctgataacggttacagatgtctccttcaaggtaatcagccttctgctgtttgtttacggcatggcaaatatcgtcggaaatatcgcagccggaaaattgttggcacaacgtcctttcgccacgttgaaatacgtacctgccatcatggcgatactttatctcgtactttacggactagggaaactgaccgtaccaacgtcaatcgtcattctgatattgggaatattcgcaggtattgcaaataacgggaatcaattcatggtatctacgtcggcaaccgaagcacccgattttgccaacggattgttcctgaccgccgcaaatctcggaacagcgttgggagcggcaatatgtggcatgttcataactgtatggggaacacaatcatctccgttgggagctgtggcattcctgcttgtcggagtggcaagcattattatcaggaatagcttaatgagccgcaataaacacataatggcagtgacaatatgaagaaaacagaacgaccaataatcactttcccaaatggacaaactgtttgtccgttgggacaaggcacatggaaaatgggacaatccgccgcacggcggcatgaagaaatacgggcattacaacatggcatcgagctgggaatgaaccttgtcgatactgccgagatgtacgacaacgaggaactggtaggcgaagctgtccgcgactgtagagagaaagtgcttctcgtgagcaaagttttaccgagtaatgcaagctatcgtggaacgaaactcgcctgtgaacgaagtttgctgaagctcggaacggagtatatcgacctctacctgttgcactggaaaggacgccatccttatgaagaaaccgttcgggcgatgaccgaattgcaacaagagggaaaaatccgtttatggggtgtcagtaatatggacacagccgacatggaacgtattgtttcactgtccggtggaagcggctgcgccaccgatcaggtactctataacctcggcgaccggggcatagagttcgacctcatgccgtggtgcgctgcccgtagaatgccgcttatggcttattcgcccatcggagaaggacgacttctgcaccaccatacattggtggaaatcgcccggcgacacgatgtatcgcctgcacaaatcgcattgtcgtggacgatgcgtcagcccggtatcattgccatacccaaagccggtaatgtaacccatgtggaagataatttccgaagcctttccattcatctgacagaggaagatttgcatgatttggataccgcgtttcccgcaccggcacggaaaataccattggcaggttggtaataacatgaaatgctataaattatgaactataataagaaaaatgaataaagtcatagatagtatgctggcacatcgttccatccgttcatacaccgacagaacggtaagtgatgaagatttaaactccatcatccgtgccgtacaagccgcaccgaactgggtaaacctgcaactcgtttccataattgcagtaaagaataccgaccatagaagacgtttagccgaattatgcggaaatcaggtacacattgccgaagctcccgtattcctcgtgttctgtactgattaccatagggtggctcttgcctgccataagaaagagcaaacgctcgatgaagtaatgcaggacattgacacattgctcgtgggagctcatgaagtcggtatcgctctcgaagcggctgtcgtggctgccgaatcattgggattgggaacagtccctattggagatgtacgtaaaaatgcgctggaaattgtccatgaattgcaacttccggaatatgtctttcctatgttgggattatgtatcggctaccccgcagaagaaccgggattaaagcctcgttttccacaacaggctgtctttttcgaagagacatataagactgatttaaaagataaactcgctgaatatgacgttatctacgcccattatcttaaagaacgtccatggaataatcgtgtaggcaactggacagacctggcagctgatttctaccgacatccgtttcattacaaaggagttgcggatgccttaagtcaacagggatttacctcggctaaaagcagatattcggtatagagatcaaagtcctaaaatcccggtcaacataagtcaaccgggattctcatcattctgtttatttctctaccatttagtgaaaaatactttcggattgatattcaacgatacccatccccaatcctgccagcttttatgattgccggttttcacagcgtccatcgtcttcgtaccacgcataaaagaatatccggcagagagtttcacatctttcatgatcgaccagtttatctgataatcgacttccgaacctaaatatttcttcaagtcctgaacctttacagctgtactaaaataatggtaattaagttccatatctaccttgccagatagacggaaacgacctccgatacgagcatccatcaatcccggtgcataaccgtttgcaaatgtagaagcataaaaataatccattgctccatagaatttatgatgggtcccataaagaggatcaaaagccttatacttaccgccatttcctttatcaccgcttaaataatcaaaactagccacggctccccatgtctgattaaacgtataggcggcttgtatgctacccatcaaagctgaaactttctccgcagctttattcttacccatctgatagtagaaagcaccatccagattccagttactattcttataagtgaggtaagtacccattgtttgtaaatagcgggtatgagaatcatccgtggctttatcacccgtttccaatcccagattcataaacaacaaagaagctccgaacggaacattatccgctttataatgataccagacggtttgcatattcttataaggctgtccggtagaagaatcatagtaagtacctccacttgttctattgtcattattctggttaaaagcaagaatcagatggacttcattatttttgttggcatatcccagcttcaatgcatcgtggtaacggcccgctacattccaatccagtcctcccaaaatacgttcatcatcataaatcaatgactgacgtcccagttgagcaaagaacccttcaccaaagttcagtttcgcccaagcctcattcaacataaaacgcccattcttctcaatctgcgggtcttgtccccaaacaccgacatgctgtgccgacatctttagttccagatccgaacgtttataatccatcgagaggcgtgcacggttattgatgaaagatgtaggagctaccccttcatcccgtggagtcaatgcaccattccgatactccgcacgaggtctgatttgcatagacatcgtaaattcattctctttctccgtgttttgtgtatatgccatgcttggcaatagcataagcaagaatgaccaataaagtgttttcattgatattgaagtttaagtgattcgatatttcaatttaaattataagtatgcacactgactccttgcgcggccggaaggtaattgattccataccagcacatttgcaacaggacaaatgatactaacagaataatcaacgcaggacgtgccttcaatggcttgcccaatctgaaatggatatacaccagataagcgaaccaggtagctgccgcccaagtctctttcgggtcccaagcccagtaatgtccccaggcttcttttgcccagatagctccggtaagcatacctaatgtcataaatgccagacctacataggtgaggttgtcacacaaatccatttctttccgttcaatctccttctttttgaaccaaagcagatagacggccatcaccgtcgccgctcccaacatagcataagcaaacatatacacaatgacatgaggggcaaaccacgggctttgcaaagcaggcatcaacgtcttattatgaatctccggtttgaagatattgatacaaataaagaccaatgaaaggatgcaactgaaacttaaaatccatttatacttccagcgtgcataggttatcaatcccgccaacggaaggaagaaagaataccacagccgtgtctctcccattgtccgcatcggaggacgttctaatgaaatccacattccgataatgaaactgaagaaaatagccagacctaagaaagtaaatccataagcccatcccgtttttgtacctttccaggcagcaaaagctcccaaagcccaacaaaccagtgcggctattgcaaatagtataaagtattcccaactcatgctttgtcctcctctttcctcttttgtgcgctgacaaacagacagatggctcctgccatcatcattattattcctgtgtaaacaaccggcaaccacggatcgcgaaccaactcgaagacactgatatcgctccatcgtccctttgtttcatcgtaactaagttgataaattttccaaccttctatctccatcgggcggttcacttcaatggttcctcccgtgatcgttccttcttgtgtgtaaatcttcacttccgatacaaatcgctgcggttcccgttccggcattacaatactggttaaagaatccagccggattgccttatagggaaaaagaaaactaccgcaacttacccatccctctttggttgtttgattcttctgattgactgctttcagatagacagcataagtcgctcccatcgaatgaaattcagtaaacttcaaagtatcttcggtagccacagaagcagccatcggaatagattgctcaatagttagctgccagtcctgcaagctgccatttgtcactccctcttccaacaatacatgtacaggagatttttcgggaagcgtacggccggtttcattatcaatcagcatcagtttcggaggatattcgtcgatagtgaaatccttcagttcgatagccagcggaagttcaatcagttgacctttatcatccgtagcccgccattcggcacttcccatccgggttgtcattttcaacctttgcatatcggcatttcccaaagtggctgttatcagtgcaataaacaatccgatatgattcagtaggaaagaaatcctgctgatcttcaaagagaaaccggtgcgaaggattgtcagccccaaggcggtgaccatccaaaagtagagcaggacaaaaggccaggaagaaatcatctgcgaaaatcccagcagatcagccggagcatgaccggaaggagcctgccggatcagtcccatcactaccgtcatgccgaccacccacaatagagacgagacagcagcggaataatgactcaaccatccgaataaatagacacgtttgcgaagaaggtgcatggctaccaaagcaatgatataaaccactaacacaatcacattgaccggacaggcaaacaggtcccaatgtatggctcccactgtcatttgcagcaatagccctatcaccagtaatcctgcgccaatcaccagcccttctttataactccatggtttgctccacatatataaattctcttatttctgtgccagacggccgttttctttcgctttctccaaccatgccggaacagttgttttcaggaatttctccttagccgctctttcagcatccatatccaagccgatatattcctgtgcttttgcctttgttgaaatgtccggcatcggaacatctcccgtatatccattctttgccaatactttggatacagccagacgggcttgcatggcacgatccaatccatgagaaagaattctctgaatttcctgcggtgcgtggaaagaacctccgtgtgaagctactccgaaatcccaacgccattgtgcctgacgaatcagtgcgagcacatctttcatctgtgtttctgtagcacccttgtcccaggcaaatttagcttcgatatgtgcttttgccaattcctgttccagacggttacggatttcattcgctttacgttggcgttcgtacacattattacgtaaagtctcttcactttcgcggtgacaaacctgacaggtgcggtcaatcatagccaacgggctttggatatggtgatcgctgaatttcacaccaccttcactcttatacggcatgtggcaatcggcacaagagacacctctctgtccgtggatacccatctgacaaatctcatagtcaggatgctgcgctttcagaatcggagtacggctcaatttatgaatataatcataaaaaccggcctcatcataataagcctccatatcttctaccgtaaaacctttgtcccaggggaaagtcaggtatttaccatcccctttgaaataatattccacatgacattgtgcacataccaatgaacgcatctcctgcggagtagctttagtgatgtctttaccctgacgttggaaagcctctatcaaagcgggacgactgatatgaagattcattgtttcgggatcatggcaatcggagcatccgataggattcacaatttcagcgcccatagccccccatttattgttatagaaagaatcgacacctaatgcctccatcatacggggaacatccggactcttacaagtccagcaggtagacggttgaggaccttcagtcgggctcatgggcgaaccggtacgcaaagatgccgtaatatcctcaatggcatgcatgtgtccccgtggagtggaataatcttttgagaaagcatatcccgcccatagaatcaccatttcaggacgtttttccaaagcatctacagcaatatttccattaaattcactctcaaagtcagtctttgcagtctccgtccaagtctggtattcacggggaaagtcattcttaaacagttcatttcgtgcttcaatccctttgataacgtttttacggttattgaaaatgctggcaacttccgccctccgttccatcaacgcagaaacgcataatcccaaaacaaatacaacgaccattgaacctccgaacaacagccatccttgccatgattttaatttcttttccattgtatatcggttttattattttattacgtatttcatttcttatttatctttctgattcaccatcttccggagccattcgggaacaggcgattccggaagaggaacaatcgctcccggagtaccggacagggaattctttccaccatgaggaacatcacgatggcaatcccagcaagccttcccctctcctacctgtgacatcatataatcaatcttccccgtcttcacaaattccgtattgagttgtgtatgacagcggatgcaattattcataatcacttcggaactggctttatgagcctgaatgacctgcggctcgcttttggtaagaaatgcagccacgtgtttcataccgtccatacctttaaaggtccatttcttcacagcattttcatgcggcacatgacaatcattgcaagtggcattccgggcatgtgaactatggaaccaggttgcatagtaaggagtcataatgtgacaattcacgcatgcagccgggtcatctccaagataggtatgcgcccggagcatatacataaacagtgctcctccacccacaataacaccgccaatgatgacagccgctaccttccatttataagaaggaaagagtcgatttattattggaaacttcatcatacgaaaaagtatttttcacaaaagtaaaggattggaaacaaaaaaggtgtaataaatattacacctttcgaaagaaaaaatactcattacgtaaaaaaacagaatgggaatgtgtcaaacgtccctttttgacctcacctcattctttctctatgtattgtcttattcatcatggtgatggtcttcgtcttccacctcattacttaatttgatattgcgtgcgatataagattcgttacctgcggcatccgtgcaataaaccatcaaatgataatctcctgcagtagcattggccggtattacaatatcgtgatgatgaatatgggcggttttctgtccggacacatcgtaggatctgttgaaactaaaatctactgtttcctgtgcagccctgctattacctccgtgtgaatggtggtcgaaattactatgaatttcaatcttataggatttcagcatgacatcatccgacaaatccatttcaaaatgaaccccatgttcgtttcctatctccaaagcctgaccttcttccggttcgtgaagttcaatcagaggtttggtcgtatcactggagtcatcattatcacaagaggaaaacatgaaagtaactgttgccaaaaggctaatcattgggagataaaatttatttttcatttcagtaattttttaaatggaactttgattaatatctggaagttacgtcccggttcggggatttcaactttcctgtaaaaactaagatgattgtaatatcgggtatcgaatatattccgggcggtcagggttatttcaatctcattatttccacctatcggaatattcaatgaaccacccagatgaaagagatttgctccggctgtacggtcttcgttacggtccactctattttgccgggcaatgctctgccattctgcatacaacatataccgattcttttgccaggttaatgtattgcgcataacaggaggtggcgagaaactcaatggaatatgttcatcacaattataggtgtaaacgtattcagcggaaatccgataattgaagttgcgtagaaaatcaacatctacggtagcttcagttcctgcgaatagtgcttccgctccggtatagcgatagatttgtccggcatgaggtaacacagaccactctccggtaggacgcagaaagatgtaattgctgaaccaactgacaaatggagagacggagaaagaaattccccggtacttcagatgataagaagcatccagttgccagccttgttcggactttagatttgcatctccctgttcatggcggaaagtgccgtgatgtacaccgttggcagccaactcattcgcaccgggcaggcggaaactacgcccgatattcacctttaccagatgcttgtcggagggagtccataccagtcccagagaaagagaataatcaccatagtgcttattcacagagtgactgttccacttgtagaagtctatctgttccggatcatagccctgtttccgaagataatcggcaaggtaagtatcttcatgcgaagagatattcatatatccgtagtcatatcgcattcctccgctgacagaaaacacattgttgggtctgtatgtcgtaagccaaagcattccggtagtggaacggcgatattcaggcagtaaaaatgaatagccggaaacgtcgttccgttgatgttgtccatcccaccccaatgtatgttcccacgaagaagaaccaataaaacgagctttcaccgaagcactgaaagtgttcagattaaaagcaagttccttgtcggggtctttctccggtgcgggttgcgaaccatagtgagtatggaaagcactccactcttcacggtgattgttctggaaacctaaatcgcctgacaaaatcagtttctcccatgcatattgctggtgggtggtcactttcaggtgattcactttactgaatggcaattcaatattacggctgtctccatcatcttccacacgtgacgcatcgggtatgccatgtgcccccggaaagaatcccgtcttttgatatacattactcacagcataattcgctttataggctcttcgttgatattgggtaaaaagtccgatattgcgttcaatgcctgctgtattcttgagtttacgcccatatatgggaattctttgtgtcaggtagacaatagaatccgtcggaatacgatagtcaccgaaatgttgttccgaataacgaatatgggagtaccaggcattcttcctgattcccagcatcagtgatcctccgatggttccattgactgatttacccagcagtgtgacatctccgaatacacgattatcagcaggaacagccgacggaacaacatcaatcactcctcccattgcatcactgccataaagcagtgaggagggtcctttcaatacattgactgctccgatattgaaagcatccagttctagtccgtgatcggctccccattgttgtccttcctgtttgattccgttttccaatacagcaatccggttgaatcccattccgcgaaccatcggtttggagaagcccgaaccaatatccattgcctgtactccgggaatattctccatcgcctgcatgaagtttcctgtaaaatgtttgcgcaaaaaatcctgatcggctacatcaaccgtaagggcagactttttcgcttgacgttgctggtacgtttcggttaccacaacatcaggcaaaagcatgctcttgattgaatcggatttctgtgcatggacggataaggttacaaatagccctattacgcccgaaataattccgatacgcatcaattacaatcttttatttaatgtgtaaaatgaatgtaaggatagattaaaagccaatctatctccattgaaaatatgagtatgtaatcatgcgaccggaggcccgcgtaaatgatgcgaataagttcgtttgcaaacaaccttatcctggtaaataatcggctcgtagggcacgagcgtcagtgtgcaatgaaattctatcggttgaggttcagtaaagaaagaaagggagtattggcagatcgcacaatcatcagatgattggtgagaatgctttgcatgggaacacgacttttcatcctcacttccatgatagtgaaaggtcttcactacaaagaagggaatgaatgtcatgaataacatccatgctatatatacccttatatttttcttttgatacattctccctctattgattaatagaatagcgggacaaatataacagtatgaaaaataatcagcaagttatacatcttaatatgtgttaccgtgaatgacaaaaaacacaaagctgtcagtaacagcacgaggattttttagttgattatcattcttcctgttgccagacataaaacacggttcttccagctccacgtttacgaagaatccctttctcaatgaaagtattcaaatcatctattgctttcagtcgggaaagtccggtcaggctactatattccaatcgggtaataccaccatttttctttagaaattcctgtaaaagctgttggcgttgctccatagaaaattccactttttgagaagagtgtttggatttatccacacgttccaactctatttcacgcttaatcttccttttgaactctttggaagtgcgcaaatgcacattatcaaaacagattgattcggcacgaatctcacgtttagtcattactttatgcgtacatttcaaagagatgctaaaatgcccgagttcgccaagttctacgatatatccctctgctaacgtttcggctagttcatccaatacaactcctactaccgcatctatcacgttatagttaaaagtctgggaagaacgagatacacgttccatgaattctttcttcgagtaagttccatttggaacgatacgggcatgcaaaggcttttgttctccggtacaatcaggatccggtgtttcatacaaatcatattgagcactcataagtatatctttttattagttcatacatttattactttcactacgtatatttaatcgcctgttcattgaactttaatcttcagttcatataaaaataatcgtctgacagttgtatctttttcgtctgacagttgtcagacggaaagataacagttgtcagacgaaagttcaacagctgtcagcagggcagacgcattatattttttactatattctcgtttgtaatttccttactatattgttggttattaacatattatcatttgctaatgtcgattattttccttatctttataagatatattaaaacataaactaacatgaaaattggcataattgacctttgtaaacaaatagaagatcctaggatgaaccgcaaaaaagtacataaaatggaaactattatctatatatccattgctgctgtaatctgtggcgctcaatcctggaatgagattgaggaatttggcaatgcgaaaattgcttttttcaaaagtcgcatacctggtctggagttcatccctagtcatgatacttttaatagattcttcagtataataaagcccgagtattttgagttgatcttccgtaattgggtaaaacaagtctgtcaggaggtgaaaggcgttgttgctatagatggcaagctcatgcgtggtccaagccaatgtgacggagaacatactacgggaaaagaaggattcaaattatggatggtttctgcatggtctgccgctaatggaatttctttaggtcaggtaaaagtagatgataaaagcaatgagattacagctattccattgttaattaactctttggaactaagtggttgtattgttacaattgacgcgatgggatgccagaaagatataacccagaccattattgagcataatgcaaattatattatagctataaaggagaataagaaaaaaaattatcaactagctaaacaaatcattgacgattatcaggatagagatgaaataaccaatagagtcaccaggcatgtgtcggaaaacaccggacatggaaggattgagacaagaacatgtactgtagtcagttatggatctattatggagaaaatgtttaagaagaaacttgtggggttgaagtctattgtagggataaagtcggagagaacaatagtagcaacaggagaatatactcaagaggtcagatactatgtaacttcacttgataataccaaaccggaggagattgcatctgccatcaggcagcattggtctattgagaataatcttcattggcaactggatgttacctttcgagaagactacagtaaaaaggtgaaaaatgcagccagaaacttttcggtggcaacaaaaatggcacttaccatactaaagaatgagaaaacaacaaaaggaagcatgaatctgaaaagactaaaagcgggatgggatgaaaaatatttgtcacaacttttacaggaaaataatttttaatgcgtctgccctgcagctgtcagacgattaatctatcgcatacaaaggtataactttatgcgatacgacctttaaatcttaggaggaaaaagacaattcctcccaagaatttaatcacccaacagtaatttagtcacagcggcagtattcaatgcccattcacgagtatatatctcgtccgcttccggaatatcaactaacttcaatccctgtgcctgtgctttgacagctaacagttcaccaacagttgttttcgcttccagcttatccagatacttttcaatggtctgtgtatccaaagaaagaatcgtctgtccaccaaaaggtatttccagccaaacgatttcccgttctttcactttcagaactccgaaaacaagccctttctgcaaactttgggaaatacgtacctgatgttgtacgcaagaaggatcgtaagctactcctgttctttccgatatcttcattggataggcagagttcatccaacctaccaccagattaggagagatagtcccgttgctatatgcattgcaagtgaaagcgacatattccgcacctacacggttcagttcattcaaatccagctcgatatattcagcagtacctttcttattaggaatacttcggatatccccgctatgtttagcgccaatagcttgcaagttgaagaaggaacaaacttctgttgtggaaggcaaagtgatatgacaactcaagtccatgtcaagatgctgtgccggaagcccttttccccactgcataaacaatcgcactttatccccctctaccgggaaacgcgttccctgcaaagcacaggaagtatcctgaattgtttcgctacgatcgccgatagccaacggaatatggaacaacatagggtcaatatacatacttttgttttcactttcgacagttgcactggcgaaacgggcagctacgacttccttacacaaatcctgtacatccttcaccatcgcttttagctgatcctccatatacagacccaccaaataatgtggttctatcaaaagagcattcccccctaaaggtttcaccattctcttatgtcccggttcaaagtagctctccgcatacatacccaaagtaactaccaaacgtgccggcaacaaatgaaccacttctttaaatgcagccaacgtctcttccgctccgaaccaaagcatattcgcaaataaagaacgtgcaaacatacccggtcgctgctttaacaaagcaaatgtctgttccgcatccgccttcaaacggttgcgctccacttctccctgccaaacggtatatgcctcgcggtagaatatatccatcaattccttcaaatttccgaattccggcttacgggcatattccgccagacgcaacgcacgtatcatacgtacccacatctctcttttcggatgcatgatttcgcaagccttctccggagccattgtcaggttgttcaaccaaagagctaccattttacattcacgacgcgtatatttcaacttcaactcctcacgcttcgcttgagctgccgaacgacttttatccaaaactccacatatatgtgtgttgtttctacctgttttacggataatagtcttaggctctatgatttgcaggaatccggttttcttataccacagataacgcaatatatcattcggagtagagaaatagatttgcgcttcctgcgctctatcctgttccaccaatgtatctatcaccaacatcaatgtctccttcattttgatttcgactgccggtaacggaagttcgccaagcattattttcaagctatccgcttgtgtggcatcaagagctgtacgcgattcaagcaagtcacagaaaaaagcattcagctccttgtcctgccaaagttccagcactttcaatttacttccctgtccgaagtattccgtagtagccgtttggaacggagttccgcagaacgggcaaccgttgtatcgttccataggaaatgtattatcagggatcacgtgtccgcaaggtagtttaaggcctttctggctattaaacaggttagcgatccatgtaaccagatgatccaagcgcgtttctccggtaggtacatcccaccctttcaccaatggagaccagtttagcgtcacgcccaatgcttctttcatcacctgaagaatcatcatctgttgagccggatataactgattaatggcatgcagcagttcttcggacaagctatatcctactttacggagttgggctaccaatgcaatggtagtcgaagtcaactcttcctgctttttctcttcttctatcaaaggcaaatagattgcattctgcctgatagacactttcaacaaatctttattcataactttgtttttttaagtaaggtaatcggaagactgtgaatcaatggagcattcctgcggttttgaagtaagtcttccttgaccttagttgataaaaagaggtagaacaggccggattcgaaccagcgttatccaccgttaagaagtaagccccggttgacctcatttcagataatcccgaagctgctgtcctacctctatatttattttttgtggagcaggccggagtcgaaccgacgaccgtcacaggatagaagtaaatcttaattgacctttttcatcaggataatctcaagattatgtatgatgctctacccactgagctactgcccctttacgaaacaggaaaactgataatcgtatgagtcaatatcttaacaggatgtatggaagtaacccgtacttgacctgttttcttgtttcttcgacaaagatagatgcagtggtgcgcagcctttttgcgcaactaaaacttttttgctcttttaaagaaaaaaataaattccaatacctgcatcgtttaaatagaaatcagcgatttgccttacgattctttacttcttctacaagttttgtaaaggacttctcctttttacgtttctcatgttcggaagctgaaaagtgccacgcttcccggcgaagtttcagatagcttgcataaactttataatctaacacaccgctattgactgcttctaaaacagcacaacccggttcgttaatatgcttgcaatctttgaaacggcacgattctgcatagtcagagatttcaagtacttcggccagtgaatctggattgtcgataaccaagccaaattcacgcacacccggagtatcgattaaaacacccgaatcattcatcaataccatttcccgacgggttgatgtatgccggccttttcctgtggacaggcttatatcggaggtaagcaacacagatttttcacagagtgcatttaccagagaacttttcccgacacccgaagaaccgacaaacacaacagtttctccctctgatatggattcccgcaaccggagaatcgtttggggttgatgaatgctcgtaaaaaatacgggtatctgattggagatatgatttatttgttcttcaacactctgcctgtcaaaatctaaatcggatttattaagcaccaatacaggcttgatgttttcttctaatacctgaaccataaaacgttctactctgcggacattgaaattatcgtcaagactctgcacaataaatgctttatcgacgtaagaagcaatggcctgcttatcggcaactgtaccacttttcttgcgatacaatgtccgctcacgaggtagcatatagacaataatccctttattctcatcaaatggttgaaaaagcacccaatcacccgtacagggtaattcagcatcagatttcccatacatcatgtttcccgtgagttcacactgaaacaatccgttttcggaaacgacctcgtagcaggtacgatgtactatggatatacgtccatgaggaagagtgctgtagagtgattcttgttttagttggcttagtttatcattccagccataccagtttaaattaaagtcgaatttgtgaattgtttgattttcgttattcatgatcttaatgtatacagcgtacacgttacaaagcaccacgatacttttagcacccttgtacgcaagttaaaaattgaaattataaagacataaagagtactcccggaaggaatcatccgagagcaaacgaaaggacaatctgtatcagaaacacagattgtttactaaaccaaatccgatttattatttcttgtcatgcgacaaagatagactatttttatttaatggcaaaacgagccgtcatttcataccgtagcttgataacccggtactgctcggtagctgccgcacccatgcttacattgctctgcgcttcgaaaggaagataacggcttatgttattatcggcaggttcgatgatacgaatcacttcacccaactgctgccccatcgcttccaccagataagatgctttctcacgggcagccttcagtgcttcaatcttaccttgtttccgatacattggcaaatccttatgtttgagttctccgatgcgcatggactcaattccccacgtattgactgaacgaataatagagttaatctgctcaaaatccgtaagccggatatccaattgcttacctatcagaaactcctttcctctctgacgccaataatctcctatttcctgtgtgcggatagcatcatccgttattcctattttgcgcaaacttttacgcaaatctttctctatcattgccaatggcactttcgtatgaaaatcttcttctttttttgatttaccggtgtattcttcttgccaatactccttaatctgaaccagaaaatgaatctcatccggaacgacttctatttcagaagaaccggtcacttcaacgtatcgtccatcactttcctgtgcattcacaacgatactccaagtaaacaaaacaaaagctaataaacatacctttttcatatcttcaatcttaatagtacaacctcttttacagaatgcgaattatcatttcacaaagctattaaaaaaaactgtaaaaccgattttatcccaagaaatcaatcaggctttttcgatccatcaaaatagtatcgccattctttaccttacacttggaagatgttttgccggaaagtaaagaaatataccctttttcaaacagcagcttcaagcgggtactggaaagaggcagacatctttttatcaatgaggataatttaaggctcaagtcgaaatcacacttgacttggatacttatgatctcactactcatattcaggatgtcttctaaagagacggtatttatcacctcatattcaacactgtcataatctaattgaagattattcctacttgccactccggcagaaaaggcatattgccaggcaacttccctgtcattcatagaaaagctgtgaaagagctttttatcaatcaagtcgggtttagttcgtgacaacagagtcatattacaagtgttatcacatttcacacatctataaatcagccagacatcaatgtttttcttctgtgcattcatcctgaacttatcactgcaataaaagcggtcactatcacagtgactgcatttcttaattaataaggggcaattcttcacccttatctcccatgtaaatgttgtttccataactatacaaaagcgattatctttctttgtgaatcaattatatttctccgcaaagttggataatagccatttgtataattcacaagatgtcacaagacgccctgaaatttatctgtcaagctcatccatcatctttataatctgttctttcaacttatccagaaattgggttctgcttttctttctattcctgatttccaagaatatacgataaaaatcacctatctcgatattaaacagtgtttcgcaacaaaaagcaatgtctttcaaactcgtatttccattactaaagcatttacctgcatacaaggcgtagataaactcaaccaaagcaactttactgtccgtccattgcaacagtttactgtctacaatggaagtgaatttaagatgaagtttctctgtcagctgctctatttcctccgacacatattctatcaagcgattattcgccagaatttctgcaacactcgaatcatgcaaggtggtaaaagaaatatctctatccagtagatgacaatgtatatcagaaagaatatcataattctcccgaataaaatagcggttatcaagctctgttcgaccggcacggtaatattcataaaagtcattattcaaaaatgatttttgcaggttctccaattcaatcttcagatatctgcattgggatgacagagatttgtcgatacgattcttttcaatctgatacaaacggacataaaacatcaacagaccggaaatctgcggtttcgatactttaaagaaaagaatctcttcttcagcacttcgaaactgatatccggcaacagctgttttcagcgaggtcagtgaaacctgtacgacaccaatgatctgcctgattctatccaaaggatcaaccgtctgaagctcaatcctttttatttcttcttctatgttcagcttactatttcttacgaaattttccattcattctcaacgcacccaccactcccatctgattagcataaaccggactaaaagcctgaataccttaattgcatcagttttgaaaaacgatgcagtgaataataaaaatgataaaatgaaaaacctgttcaagtatagaactactcaaacgaaagaaattagcctgtggtttatgaggctaatattaagctataacaaatttaagaattgtgcccaaaatcattgcttttagaattcagatgcaaatataattgtttttttaggatgacatgaagtttatatgaaattttgaaataaactcaccagaagtatagaaaaatagtatctttgcctccgacttttcacagatactgtgagaaagcaattcttttaattatataaataaaaaagactatgatcagattaaatgtttttgttcgtgtaaacgaatccaaccgcgaagaagcgataaaagcggcaaaagaactgactgcctgttctttaaaagaagaaggatgcattgcttatgatactttcgaaagcagcacgcgtcctgacgttttcatgatttgcgaaacttggcagaatgccgaagtattggcagcacacgaaaaatctcctcatttcgctcaatatgtaggtatcattcagaaattggctgaaatgaaattggaaaaatttgaattctaaatgaattacgaggctgttcgagaacagcctcattaaatccgctattcctctatctttccgagtagaattagtcgagtttcttatggataaatattccttcaatccaataagttgcatgattcgattcaaatttcaacaagacataaccgggatcagtggggccaccgggaaaatgattgataaaccagtcctgccaaagttcctgcttcatcttttcgtcagtcacaacttccactttccccgttaacgccacgctgtctcctttatcctgaaagcataatcctgctttcggattcgataagaaatcaattgtttttagtgaatctgctccggtagacatccagatagtggaaattccttctgtcaggattttgctcatcggtacagggcggggataaccttctttattcacagaagcaagggtaactacttcacatctctgcaacaattctgttgctttctctttcattgtttttgtggtcataagctgattggtttttattaatcttgcaaaggtaacggcatatcttcccattctattgtaaaaaagcgacttttacctaatctatctttgtggttcgatataagtaagtgtggtttcttccggaacggttagggaaagaaaagacgcaggagtattgccggacatcgacttaatctcttttgaaaaatgcgctaaatcatagtatcctgcatcaactgccgtagtcaacagattggctgatgttgtggttctcaacaattccacagcattcttaaatttaacaatacggctgtattctttaggagtaaatccggtataatgcttgaactttctctcaaaatgacgctgacacaaacagacatcatccatcaagctgcgaactgaacgttttcctttggaatgattaatcatgctcactgccatagcgacatgagaatcggcaggctgataatgacgcgccaaatatgccagcaaatattcttccactactcgtattcgatctgtgacatgcttctgctcacctaatttttcaataaaagtgtcatcaaaaacagccttcatctcattagtactgactctgctattcacaaactcgtgtagaggcaggtttgtaaagcaagacaaaccacaaggtaaaaaacgaacgccaaacatgtgaatcgattctgtataagtgacgagttccgaatattttgtcataggtcctacaaaataggaacgatagggttgcataatcagactcccttcttcaacagcattagccacctctcccagcgtaaatataaaatcggtacaaccatccggcagaatatggatgcgcataccataatccggattgcccttaaactcccaatagctatcaatgtagggaacaagtaaatgagaaggctgatattctgtatacatggatctattttgtacgcaaatatagcgaaaataaattctaatcaatgatgcgtccgtttgcctttgccttttgaagccattcagggacaatctcttcgagaaatttatctttgcctaccttttcggcagccatatccaaaccgatatattgctgcgccttttctttcgttgtgatatccggaagcggaacatcaccagtatatccgtacgttcaatttgaaggggtcactttcagctggacaaaaggaatcaatttagattggattcaggggatcaatttgatttggacaggagggggcaaatggtcccggattttccattttgtccatgcctttggtttatgtcgaacaaaaatagtgtaaattctttaaaagaagagttttttattggaaatgtttccccaaagtccattttaattcaatttttagtaaaaggtttctatttgccaatcctgttactatattttctccaacctcattttttatgctatatttgtatccgaaaaaataatagaaacgatgataaactttgcagctatcgactttgaaacagccaacggcaaacgtaccagcgtatgcagtgttggggttgtcatcgtaagggaaggaaaaataacgaataaaatctatcgtctgatccgtccccgccccaattattatacgcaatggaccacagctgttcatggcttaacttacgacgacacgatggaagccgacgaatttccggaagtatgggcggaaatcaaaccattgatagacggtctgccacttgtagcgcacaacagtccttttgatgaaggttgtctccgggcggttcacgaattatatgacatgacttatcctgattataagttttattgtacttgccgtacttcgaggaaagtctttggaaaagatttgcccaatcatcagttgcatacggtagcagaacgatgcggatatcatttagagaatcaccaccacgcactggcagatgcagaggcttgcgcacaaatagctttacttattattcccgaaccgaaaaaagcaagaaaaacaaagaaagctgataaagatatacatgttggagatttattcgcttcacttattcctcaaccagtgaaaaagagcaaatgaaaaacactacaactattatttcaatcaataatagccgtagtgtttgataataaagtgctaactatgtacttcgattagaggatagattttgcaatacccatttccaagccgcgaagttcagccaagccgcgaagacggcccaggcaagaatatcccggattcgttttctttttcaagtcatcaatcatttgatgtccgtggtcgggacgcatagcgatagagcatttacgacgctgttgtagaagaataaggctcttcattacgttgtacatgtctacatttccttccaagtgattagcttcgtagaagtttccttcctcgtcacgttgtgtactgcgcaagtgtacgaagttcacacggtcgccaaaacgttccatcatacctgcaagatcattgtcggcacgcacaccaaaagagcctgtacacaagcagaggccattagattcgttaggtacggcttcaatcaatttcttgaaatcctcttccgtactcaaaatacgaggcaaacctaagatggtataaggaggatcatccggatgaatcaccagtttcactcctacttcatcggcaacaggagcaatttcttttaagaaaaaaatcaggttggaacgaagcttctctgcatcaatatcgtcataacgatctaatgcttgctgaaattgttctaccgtgaaactttcttccgaacccggaagtccggcaatcatattacgaaccaacaatttcttgtcgtcttcgctcatctgctcaaaacgagctttcgctttagctatttcttccggagtatagtctttttcagcattcggacgtttcaagatgaaaagatcgaaagctacaaaagctgctttttcaaagcggagtgctttagagccgtccggcattgtataggcaagatctgtgcgggtccagtccaatacaggcatgaagttataagtaactaccatcacgccacacttcgccagattacggatactttccttatagttttcgatgtatttcataaagtcgcccgtctgtgttttgatatgctcgtgtacaggtacactttctaccacagaccatgtcagacccacttcttcaatcatttgcttacgcttcatgatctcttctactgtccacacttcaccatttggaatgtgatgaagagcatttactataccagtagcgcctgcctgcttaatatcccacaagctaaccgggtcattaggaccataccagcgccaagtttgttcacataaatacatattattctttcctgattacaagttactaattatgattaaaaacagaatgatatcatcccaatattagatagagaatgcatcaaatccaccgtcgataacagctactgtacctgttacgaagttagaagcatcgctaatcaaataatggattgttccataaaggtcttccggttcaccgaaacggttgaatggagtatgagcaagaatggtctttgaacggtcagtcagagaaccatccggattagtcaataacgcacggttctgatcggtcaggaaaaatcccggagcgatggcatttacacgcagaccgttaccgaatttcaaagccagttcaccagccatatatttagtaaagttagcaatagctgctttagctgcaccataacccacgacacgagtcaatggacgaagagctgattcagagcaaaagtttacaatagaacctttcttctgttccaccataatttcagcaaataccatcgtaggcaatactgtaccgaaaaggttcaaatccactactttcttgaatgcgtcaatctgtaaatcgaaaaaagttttatcaggagcaatagttgcacctgccatgttacctccggcagcgttcaacaatacatcaatacggccataagccttcatgatttccactttgttgccttccaacacttctttatccatcacatccgtgtaaaggaacatggcttcatttccttcggctttgatactgtctaccaatgcttttcctgcttcttcacttctgtcgagcacaactacttttgcaccttcctttgcgagatacgcagcaatacctttacctaaaataccagctccaccggtgataacaactactttgccttttacgttaaataattcattcatggttcttacaaatttatatgtttataatttattgttcagataatatttcagattctctttgagaagaatatcgataggcatcaaattaaccttttcactgccctgtttgaacaacagatgattacacaatgatttaataccatcatatccctgacgctccggacgctgcgcaatcaatgcggttatcacaccttcggaaagcaactgtgtatttctcccgataaggtcataaccaaccagtttgacagactgcattcctctcgctttcaggtaattccctaaaatatagcaagttgaattaaaaataacagccccatttatattcggattagcttcaaatatttcatccagcttcatgaagttatacactgaatcatttattttcagctctacttcatgcagatttccgttgaaccctgtttccgtgagataatggcagaaaccttcgcgcctgttctttccctgattagagtcattcttcccactatgaataattcgcgccatcaatatatcggaagacgaagaaagccggtccatcaacaatctggcagcaatcactccggcatcataagactccgttccgaaataagccagttgatgttgccctccaatgttggagtcaacatacacataaggtatttcattcctgtcaagttcctgcgaaagccggataacagaatccgtaaacaaagtcgcaatcaatacaccatctactttctcattcagcagattacggatgatatcatcaaaagtcttgttattatattgatcgaaaaagagtttggtaatggtgatgttatacgattccatttccgacgctgctttatctataccttccgaaatagcttcccaatactctccctgaacaaaagaaggagtaatcgctagaagatgatattgctttttggaggccgccaatgaacgtgccatcagattgggctggtaatgtaccatctccagaatcgcctgtacctttttcctattttcttcagataccctaccacgattatggattacacgatctaccgtgccaacagagacacctgccatcttagcaatgtctacaatccgaatatttgaaaactctttatccatttattgataagtatcttgtttttcatcgacaaaagtaaaatgaattattgaattaagcaatagtgtgtgcgcacacacataacatacaataaagaacatattattaataatcagctagttaaccagaacaaccaggaagtatacatgttgttaaacataagaaaaagtaaagatagtatagagaaaaaagcatttatcagatgagaaatcagagggaaaatagcttttgattcttgaaggaagtgaaaataatggagaagacacaccaatatgtgttcgtgcacacatcattcaaatagtgactgataaggctagaaataaaagattaaacgtatataaaataaaacaggtaaccgattctatttaaatcgattacccgttttggagttcttatttcccccacttatcttttgcttttccagccactttatcggcttcatctgctactttatcagcaatttccgcaccggcttctactgctttaagtccaagatccactgcttttctttcagcatgagcagcagctatttcagcatcacgacctatgcgatggatagcattataaatttcactttctaattgttttgcttttgctgtacgtgaaagacgataagctactgcgccaaggattgacccaattccgagtccaatccagaaatttccatgtctacattccataatcaagttctgtttttaggattaaaaataaattatataaatatctatttagatttcgagaataaagaagcaatccacaatacaaggatagctcctacggtggaagttatcaaacttccgatcagtcctgaagctgccagtccgaaaagggcaaacacccaaccgcccagtacacctccaagaataccaagtaataaatttataacaagaccaaaacctccgccgcgcattattttacctgcgaggaatccagccacaataccaataacgatataccatataaagcccatataatcctccttttttatttaacaacagtaggtatgaagaatagttcagtcactcaaaactgaattaacgacaatttacaatccttagtcttagagctttattcctatcatattgaattaatcacagcaaatatatattgagaaacgggaagtttccgtacctttgcagccgatttttcaggaacacttcaatagtaaataggtattatggtacagaatcaggaacaacccgtaggaaaaattacattttccattttgattgcattgagtctttcgcattgcctcaacgatcttttacagtcggtgctatcagcatcttatcctttatttaaagatgatttaggacttagtttcgcgcaaatcggacttatcacactagtttatcaactttccgcttcagtttttcaaccgattaccggaattttctttgataagcatcccgtcgcatggtcattgcctatcggaatgagctttacactgattggtttgataaacttagcattctctgataatctatactggatattagcctccgtattcttaatcggaattggctcttccgtactgcatccggaagcctcccgtatcacgttccttgcctccggcggaaaacgtggactggcacaatcactctttcaggtaggtggcaacttcggaggttcattaggtcctttactggttgctctattggtggctccttatggcagacaacatctcatcgtatttgcatttgtggctttagctgctatcggagtgatgtacccaatttgcaaatggtataaatcatatctaaaccggatgaaagcacagactgtcagtgttagaaaacctgttcatcttcctttgcctatggataagacagccctttcaatcgcgatattgctgattctgattttctccaaatatatctatatggcaagtctcacgagttattatactttctatttgattcataaattcaatgtaagtgtacaagattcgcagctatatttatttatctttctggtagctactgctatcggaacattaatcggcggacctgtcggtgaccgtatcggtcggaagtatgtgatttgggcttctattttaggagctgccccgttcagtttactaatgccacatgctaatttgatgtggactattatccttagcttctgtgtgggattgatgctttcttccgcttttcccgccatattgctttatgcacaggaattgcttcctaccaagctcggattaatatcagggttattctttggatttgcattcggggtggctggtgtagcatctgctgtactcggtaatttagcggataaaacgagtattgaatatgtatataatatctgtgcttatatgccgctactaggattggtcacattctttttacctaatttgaagaagaaaaaaatagaataagattagattaaataaaatagggtgtgtcacattttgcgctccctcttttccaaagaaaacgaccggtatgcgtcgtcacgacgtataccggtctacaagttaaggtcaaagtcaaaaaattaagagagctatttatatgttagggttagcgttaatttctttctgtggaatagcatataaataataggtgctatttactgtaaacggtttaccgttcgggaagttaaggaaccaatgtcccagaggatttcgtttttcaaagctaccaccctcctgccagcaatcgacttcagtcttctgcatctcatccgataaagcagcacgttctactgccttttgtgtacgaagtatatcggtaataccaaatccttctccccaaagttcacggcgacgttccatcagaatctcattgattacatcttcctgtgattttcctgtcacctcataatcccctactccacgggcattacgcaatgtattcaatggagctacagcctgtgccaacgctacgccatcacgaactttcgcctccgcttctatcaaatacatttcagcagcacgcatcaagaccagatcagccgtatcatctgcacgcatgtgaaatttcttatatcccaaatatccttcacgcatccactgaaacaaaggtaaacgaatatcaccttcggtaaatgtatctttcagatggggatcagccataaagctgctatatgctcctacgtatgttgcatccaaataatagaaattatagctggcatccgattgggaaggaatttgaggaaatccccatatccattctttattggaaatattattaaaaccttcgtactcggctgtagttgtcatcaacgtatatcctgcacgtgctgcttcagcagctttcgcagcttcttcccactgtcctgtcagcaagtaagcacgagccaaaagaccgttgactactgctacatttggtttgaacttttgattatcaccgctgcggacatagtttttcaaatagtccttcgccaaagtgaggtcgtcgaaaataagctgataaacctgtgccactgttgattttcctttcggtacagtggaactattgctaggttcggtatatataggaacacacggagcatctttatctttcaagtaggtgaattgataatgctgtaccaggtgcaaataacaaaaggcgcgtaatgccaatgcttgtccctgtgcctgacggagttcttccgaatcccccttgatagaaatggcagtgttacaattatctatcgttttatatatcagataccaggcaaactctgttctaccatttgaggattgcgctatatctttaaactgatacgaagaattgaaaccgtatttcggacgggaaacaacatcacttgccatcatgtcgtccagacactgaagcgcccgataaccgatattggcataggtacttgaataatcaaacagattataccaggcaccattcacaagtgcctccgcattttcgggtacaggtactttttctgaacttaccgcatccgttgggtccgtatccagaaaactgctgctacaactcgttgccaggaaaagtccggcaactgccgcaagaatggattgaatttttatttttctcataatttagtctgaatttagaaagaaacgttaatacctccggagatcgttcgcatagccggataacgataataagtaataccggtaattccctgttctgggtctagtccctgattccggtgaatggtaaacagattatctccttgtacatatacctgcacactgctcaatgataacttactaatccattgtttgggtaagttataggaaagagtcagatttttcaatcgcatatacgagttattctgcaagaaacgggtagaagccgaattccagtcattagaggtagtactcaaggccgggacatctgtatagcgattgtcgggagtccatctttttagaatctctgtcgaccagtcacgtccttccagacttccgttgtgcagaatcattgttatatcacgattgtagatatatccaccgatactgtaagcaaagatggcagaaagatcaaatcctttccaggaaagagaggtattaaatccaccatacaccttcgggagagacgatttattgatgtaataatagtcagccgaatcgtaatcgtttgttgtcacacgttttccggtcggattcttatttgcatccacctcatccttataccacagcggatctccattttccggatctactcccgcccactctatcatatagaaatcatacaccgaacgacctacctgcaacttgttcacaccacttcgcggcatatctttcaatgggaggtctgtcaccttatttttatagtgtgtcaagttcatacccagtttccatacccaaccattctgattgataatcgttccgttaagcaccatttctatacctgtattcttcaaggctcctacattctcgtcaatagaaccgtatcccagggaaggagctagcggacgtgaataaagcaggtctttcgaacgacgtgtaaagaaatcaaacgaaccggaaaaacggttattgaacagggagaagtcgatacctacattaaagttgaggtttgtttcccatttcagattcggagttgccatacggtcggacactaacgcattttctcccaaattggaaacaatggtataaagtcctttacttgcataataagtacccaggttgtcatttccctgcgcaccatagctcattttcagagtcaaggcagacaaccagtcggaagtacttgccataaactcttcccggtcgatacgccaagaagtacccaacgaccagaaatttccccagcgggtctccggcgcaaaacgtgaagaaccgtcgcgacgataggatgccgagaagaaatatttattttgatagtcgtataatgcttgagtcagataacccaccaacgcatagtcgatgcgataccccgaacctccggtcaactgtgaaccgactaccagctccggcatatcaggctgcgccattttggaacgtgatgccgtcagttcatcgtagcggtaagaataggcctccacaccggcaagaacattaaaatgatgttcaccaattgtcttgtcatacgtaacaatattattccatgtccaagagaaagtacgggtattcattcggctgacgccgccgccgttttctttagccgggcctaacttcggattcgtataatccaatgtattataattaatcaagtcaaagttaaaacttgtcttgaatttcaatccttcaataatcgtagcttccagaaaagtacgaccggagacttcatctttcattcgttccgatttatccaaaggcaaagtagccggaaggttccagtttgccatcgaaccggaaggacgataggaaccgaagtcataaatacggtctccactctcatccaatttgtagctaccatccgtattcatttcataaatgggatagaatcccggcatggtacgtcctgcggtaatcacattactggttttggagtcggatgaaactggatagttctgcatggaatgtgcgaaactcaaattgacgcctcctttcaaccaggaagtcatctcgctggtgatattggaacggagattgaaacgctggtaaccggattcgagtgcaatacctttatcattcaggtatccggcagaaaagaaatactgattcgcttttccacctccggaaacacttagatttaactctgtgcgaagtgcctgttgctccatggcgtcactccagtcagaattccataacggacgggcacctgccaccagctttccatctgtaccgaccggttgcgcatattgaggaccataggggttcgggccacctcccattaatttcgttaccaagtctttggatgcttgcgtggcggcagttgccggagtataatccgcactcttggcatactgattgcgaagtgcttcccaatataattcaaaatattggtcggtactgacacgatcataatcacgcacggcacggttggaacctcctaaggaagctttcacctttaccgttgctttggtattttgatctccctgcttggtggtgataataatcactccattcgcaccacgggaaccgtacaaagcagcagaggccgcatctttcaatactgtcatcgaagatatgtcatccggattgatagagttcacactaccatcaaacggtacaccgtccactacataaagcggagcgctggaagcgttgatagacccgataccacgaatacggatttccgcatccgtacccggctgcccacttgccgcacttgcctgtactccggataccgtaccctctaatacacgtgatatgctggaagtctgtaacttttcaatctcacctgctttcatcgtcgaagctgctccggtaaaactatactttttagcggtagcataagctactaccattacttcttccagttccttactttccgattccaacgtgacattaatcacactccggttattcaccggttgttctactgttctcattcctacaaaacggaacactaaagtaccggtagcaggaacctcaatcgaatactttccatcaatatcggtaatggtgccggaagatgctcctttcaattgtacggagacaccaggcaaaggttctccttcagaagtcaccgtgcctgtcacgcgtttctcctgctgtgcttccgcatatactatatttcctacaaaaagcagaagagacacgactaataaacgtaaatagattctcataattttgtggcttaagatttatttgcttgttgtaactaacagtacattgaacttttttgtttaggaaacgaaacattttttagaagattgctagtataaatcaacgaaagatagtacattcgtgaaactaaaaatatctataccaacaaagaaccacatggggaaacgggttattctatatctttttctgttattttcactgtccttacaggcgcagactgaagagaaagtctctttaggcaacgatagtacagaagtagattccacaacaaccaccaagccaagtgcttttaaaagagcgatcaagaagtttatgaacttcagtgatttcgatacgctctatatcagtctcaaccgttataactatgcgctgatggttactcatttcagcaactttgagtattattctatcaccagtgaattgccgcagccacagaaacttagtttttctcccaacccgcacaacaagataggattgtatttcggctggcgatggattttcctgggatggtctgtagatgtgaacgatattttcaaaaaaggtacccgaaagaacagaggaacagaattcgatcttagcctatacagttccaaactgggtgtggatatcttctatcgccgcactggtaatgattacaaaatacataaaatcagaggattttcagacgatatcccctctaactattccgaagatttcagcggaataaaggtagatatcaaaggactgaatctatattatatcttcaataaccgtaaattctcctatcctgccgcattcagtcagtccactaatcaacgacgcaatgcaggtacatttattgcaggtttttccatttcaaagcatcatctcgacttcgactatacagcacttccgggatttatccaggaggcgatgaatcctgccatgaaagtcaagaatattaaatacaccaatgccaatatcagtttcggctacgcctacaactgggtctttacccgcaactgtctggcatgcctgtctctcacccctgccattgcctacaaagcttccgatgtggacgcagaaacaaatgaagcaaaagcatggtacggtaaattcaatctggattttctggttcgggcagggattgtctacaacacaggcaagtattacgtaggtacttcttttgttggaaaaaactacaattatcatcgcaacaatttctctgtcgacaatggattcggtactctccaaatatatgccggattcaacttcaacacccgcaaagaatacaggaaaaagaaataattccacagaaactagaaatcatcaacttgcttgcttatccaaagaatctttgtacatttgccacgttctaacgaacaaaagtaaaaaaatcaatgaagcaacaacgccacatacagaccacacgcactcttctttcccgctttcgctactggggaagaaagaactatgctgcctttgcaagtatgggacgcgaattccaaatcggtcatctgcataccaatgtagtagacgttgctcttcgtaagcagaatgctgcacaaactatcccttatcatacatttatgacacttcaggaaatcaaagaccaagtgttggcgggtatcgacatatcacccgaccaagcagcttggctagccaacatggctgacagcgaggcgctttatgccgccgcgcatgagattaccgtcgcacgtgcttcgcacgaattcgacatgtgttccatcatcaacgccaagtccggccgatgcccggaaaactgcaaatggtgtgcacaatcctcccactaccagaccaaagccgagatttacgatctcctccccgctgaagaatgtctccgacaggcccaatacaacgaagcccaggacgtcaaccgattctccctcgttaccagcggacgaaaaccatctcccaaacagattacccaactttgcgatacagtccgttatatgcgtcgacattcgtcgattcaactttgtgcttctctgggactgctcaatgaagaagaattgcgttccctgcatgaagcgggaatcacccgttatcactgtaatctggaaactgccccgtcttatttttccaaactctgctctacgcatacgcaagaacagaaactggctactctcgatgcagcccgtcgtgtaggcatggatatctgttgcggaggtatcatcggcatgggagaaacgatggaacaacggattgaatttgctttcacattggcagaactgaatgttcaatccatacctatcaacctgcttagtccgattccgggaactccactggaaaacgagcagcctctaagcgaagaagaaatacttaaaaccatcgcactctttcgttttatcaatccgaccgcttttctgcgttttgccggaggacgttcacaactttcttccgaagcgatgcacaaggcattatatatcggaattaactcggctatcgtaggcgacctattgacaacactcggctccaaagtatcggaagacaaaaagatgattcaggaagaaggctatcatttcgccgattcccaatttgatcgcgagcacatctggcatccgtatacttcgactaccgatccgcttcctgtctacaaagtaaaacgggcagacggcgctaccattaccctcgaagacggacgaacgctcattgacggaatgtcttcctggtggtgtgcagtgcatggatataatcatccggtattaaatcaggcggcaaaagaacaattagataaaatgtctcatgtcatgttcggaggactgacgcatgatccggccattgaactggggaaactgttattgcctttggttccttcctccatgcagaaaatattctatgcagactccggttcggtagccgtagaagtggcactgaaaatggctgtacaatattggtatgcagcaggaaaaccggaaaagaacaatttcgtgactatccgttccggctatcacggtgatacgtggaatgccatgtctgtatgtgatccggtgacgggtatgcacagtcttttcggttcggcattgcctgtacgttattttgtcccgtcccccacttcccggttcgacggagaatggaatccgaaagatatactacctctacaagagatgattgaaaaacattcaaaagagttagcggcgcttattctggaaccggtggtacagggagcaggcgggatgtggttttatcatccgcagtacctgcgcgaagcagaaaagctttgccggaagcacgatattcttcttattttcgatgagatagcaacgggattcggacgaaccggtaaactttttgcttgggaacatgccggagtagaaccggatataatgtgtatcggtaaagcactgaccggaggatatatgacactttctgctgtattgaccagcaaccggatagcagatacaatctctaaccacacaccgggagcttttatgcacggacctacatttatggggaatccacttgcgtgtgcagtggcttgcgcttccgttcgcctgctgctcgaatccggttggcaagagaatgtgaagcgaatcgaaactcaactgaaagaagaactggctcctgcacgggaatttccggaagtggctgatgtacgaatactcggagccatcggagtcattgagatgaaacgtccggtaaatatggcctatatgcaacgaagatttgtggaagaaagaatctgggtacgtccctttggcaagctggtatatctgatgccgcctttcatcatcacttcggaacaattaagcaaactgacttccggcttacttaaagttattcaaaaaagatgacagataagaagaatattaccagattttcacccaagaatctgttcctcggtgagcaaaagggtgttcctcggtgaggaacgggcctttcctcaccgaggaaggatgccttggtcggtgagaaactttcgggatacttctttagacaataaacatcttatagacaactgattacgctttcaaccatccatatatcgaatacttattacttaaaacaataattcatgacattagaacatataaaccaggaactccagaccttgaaagagaaaaagaactaccgttctctcccaccgctaattcacgaaggacgagatgttctgctgaacggacaacgaatgttgaacctatcttctaatgattatctcgggctgtccaatgacatttcattgaggaaggaattcttaaaaacactcacccctgaaacattcctgcctacttcctcctcttcccggttactgaccggcaattttagtgactatcagaagttggagcaacagctagccacgatgttcggaacggaaagtgcacttatattcaatagtggttatcatgccaatacaggaatacttcctgccatttgcaatactcacacactgattcttgccgacaagctagtgcatgcaagcctgatagacggaattaaattatcatcagctaaatgtattcggtatcgtcacaatgatatttcccagttgcaacgactgattgctgaaaatcataacgcttatgagcagcttattattgttaccgaaagtatcttcagcatggatggcgatgaagctgatcttcccgctctcattcaactcaaaaagagttattccaatgttcttctttatgtagatgaggctcatgcttttggtatacgaggaaaaaaaggattaggatgtgccgaagaacaggactgtatcaacgatatagactttttagtaggaacattcggaaaagccattgcttcggcaggtgcctatattgtctgtcggcaactcattcgggaatatcttattaataaaatgcgcacgtttatattcaccaccgcacttcctcctatcaatatccagtggacttcgtggatgttagaacgcctttcagctttacaacataagagggctcacctgctacaaatcagtgaaaagctaaaggtagcccttacagccaaaggatataattgcccatcggtgagccatattgtacctatgattataggagccagtgaagataccatattgaaagcagaagaactccagcgcaaaggattctatgcattgcccgtccgtccgcctaccgtacccgacggaacttcacgtatccgtttttcactgacagcggacatcactgaacatgaaattgaccaactcatcaaattgataaacgaatgaagcagcattttatcataaagaataatcagaagcatctattgcttttcttcgccggttgggggatggacgaaactcctttcctgaccattcatcctacagataaggactggatgatttgctatgattaccgttcattagcatttgataccgacttattagaaacctattcccagattacacttatcgcctggtcgatgggagtctgggcagcttcgcaaatcatgaagcagtacccacatctgcctgtctcccaaagtatcgccatcaacggcaccctctaccccatacacgaaaccaaaggtatcgctcactctattttcgatggcacacttcaagggctgaatgaacaaaccttgcaaaaatttcaaagaagaatgtgtggttcaatagctgactataaaacttttcaaaccatatccccccagcgtccgatggaagaactcaaagaagaacttgccgctatacaacaacaatatttatcattgccgccctctgattttaaatggcaaaaagctatcataggaaaaggcgaccgcattttcctcccggataaccaatatttggcatgggaaaaccaagtggactctcttgaacaagtggaagcggcacattaccaacaagagctttttaacacgatactcatgcagccggagaactgatgcatccatcattttaaaataaagtgattatcaagtatatcagcctattaaataaatattgattatgaataaacgactaatcgcagaacgtttttcaaaagctatcactacctatccaaaggaagcaaacgtgcaacggcaaatagcaggtaaaatgattcgtttgcttacagaacacataccttctccctgttcgaaagtaattgaatttggctgcggaaccggtatttactcccgtatgctgctccaagccctccgtccggaagagttattacttaatgacctttgccccgatatgaaatattgctgtgaggacttattaatgaagaagcaggtttcttttcttccgggagatgccgaaacagtctctttccccaccgaaagtacattgataacttcctgctccgccttgcaatggttcgaatcaccagaaaactttttcgaaaggtgtaataccctactcaataatcagggttattttgcttttagcacttttggaaaagaaaacatgaaagaaatacgcgaacttaccggcaacggacttccttatcgttcacgggaagagctcgaagtagctttgtcaccccattttgacatactgtattcagaagaagagcttatcccgctttcgttcgaagacccgataaaagtactatatcacttgaagcaaaccggagtcaatggcttatcaacgcaatcctctcctaccggaaaacaagagaacgatttgtgttcatcagacaacaattcaaagaataattcaagaactaattctaagaacaatctcccccaacaacagtggactcgtcgtgacttgcaactcttctgtgaacgttacacgcaggaatttactcagggcacttctgtgtccttaacatatcaccctatttatatcatcgcaaaaaagaaaaaagtatgaaacagaatgtatatttcgtaagcggtatcgacactgatgccggaaaaagctatgccaccggctttctagctcgtgaatggaacaagaacgggcatcgcaccatcacccagaaatttattcaaacgggaaatgtaggtcattccgaagatattgacctacatcggcaaatcatgggaatccctttcaccaaagaagaccaagagggactaaccatgccggagattttctcttatcccgcctctccgcatcttgcttcccagctggataaccgccccatcgactttgataaaataaaacgtgcgaccgaagaattgagtgaacggtatgactctgttttacttgaaggagcaggcggccttatggttcccctgacaactgaacttttaaccattgactacatcgtccaagaaaaatatccgcttatctttgttacttcgggcaaactggggagtatcaatcataccctgcttagtctcgaagcaatacaaaaacgcggcattgtactagataccgtattatataatttatatcctaccgtagaagacaagacgattcagaatgatacaatggaatttatccggacctggctgaaaaagtattttccggaaacgaagtttatactggttccggaaataaaaaagaatctatagaaaagtaatcaccgactactttcactcaacaacaatcgtactcttttgtggattatggctatcataagtaactttcaccggatacatatagccataatcctttttttaaacagtagtcgaatatttatctaaagcctttctcaatgttctttccgaaatcggtttggtcacaaagtcattacaacccatctccaatgccaattctttatccgcctcaaaagcataagccgtcaaagcaatgattggaatttctttagaataagagcggataatatgggttgcttccagtccatccatacgcggcatttttacatccatcaggattaagtccggttggtactgcttatacatttcgatagcttccactccgtctttagcccaaagcaatgtatattccctgccaatcagattcttcagcaagataaaattgctctccacatcttctgctaccagaatcttcttaatctgttgtacacgattgactgtatttcctttagataccactttcgactctttaaagaatttaccatgctctccggtttcttcataagggatcgtgaaatagaatgtggagcctttacccagttcggaagtcacccctatttctccaccgattttttcgataatcatccgacagatagacagacctaatcctgtcccttgggcaaaagagttcagtttgacaaaacgctcgaagatatgatctaccttttccggttctatccctattcctgtatcctttacatacacacgaatatctttatccattcgtccaaaaccaaaacggatctctccttcataggtaaacttacttgcattagtcaggaaattcgttatcacctgcatgatacggttctgatctccctccatgagcaaatcctcctcctcattatcaaagacaagagttaccccttctttcacacgttctttatgaacagtataaattgttcggcagacctctcccagattcattggacgtttgatatattccagtgtcccggcttctatcttcgataaatccagaatatcattaatcaattgcaacaaaatatccgaattctgattgattatatccgaatagagttttttctcttcagcagtttcggcagaaggcaataactgggagaatcctacaatagcattcagcggagtccggatctcatggctcatgttagcaaggaaagcgcttttcaatctgtcggattgctccgctttaatccttgccctaatcagttcctgctcaatattctgaagattagtaatatcccatgaaatgccaatcagcaacggtttacgtccctccatcggtacaagtgctttcaaagtctgcacgatacgcgcttctccattagcggacaaataagtttcctgcatatcaatgcgcttatgagtctgaagtaattctaaatcatctttacggaatttctccgcatctccatgcaccggaaatatttcataatccgtatgcccgatagctttagacgccggaatacctgaatgatcggcaaatgccttattccaatacaaatatctaaaatcatcttccgggtccttcacacacaaatagaccggaatattatttaaaataccatccaacaataaattcagttcgcggagttcatcccgtttcttgataacatcagtaatatcctgcgtaaagaaccaaatgagttcctgattattttcacgaatcagaaaagcagatacctgatgtactctctccttcgtatgcccgtaaggtatataagccgcccgataagcaaagctaccatcgttatcacgaatttcctgcaatcttttttcccacgcccccctgtcggtcatagagacacgcaaatcatatactttttgtgtacccaactcttgcgttacaccgtattcttctataaattgcttattcgcataaaccagcgttccatctcccgccacagcaagaatgctgtcactcaccttatcgagcacacttttaaaaacttccaactgcctttgggtagctactcgttccgttatatcacgacacataatcagcacgtattcctcatccaacggaaaaatacggttctcgtaataatggcgttcaccattaaaatccagttcgtgatgtgcagttgaaacagttccggtggtgatagcatgacgcatattggagtgaatattctgatatgcttccggtggaaccatatcctgcatacgcatccctctaaaatccttgtttgatattcctacatggttggtttcctcattggaaacaacttcaatacctacctcactctgattgaagacagtcagcatatcgggaagagagtctagtattctaacagcatatttttctttaaaactaacaggacgatcgttatatttctcatccctaagggtagaaagttcttttctaagctgctcgttttcttttttaagtgcttctaactgttctaataatgcttctttgctttgttcgatactcataatgtaacggtgtaaatacgtacttatctgccaaaagtaaatatttttttgaataaaagcacgtatttaccccgtttttttcaaagaattactcaattaccataatccggtcgttcaatcccaccttcatgccatcttccacgaatacttctttcacaactccatccgtcaccgaacgtatctcattctccattttcatcgccaccaatacacaaagcggatcaccccgcttcacgagatctcctttctttacatacgtcttcaggataactcccggcatcggtgcctgtaccacctgacgccctacggattcagcagcagtgcgggcattatgtatcttctccatttctccctgcaattcaatctgataaagctcccctttattcataatcgtatatgaattattggaagaaggagaaatctgcactccatgcgagtggtgatcaatgatgatcgaatggatagagtcgccacccatgttataatcgacctcatatatcttaccattgactgcaatcttcttgattggtccgtcctccagaatctccaccttatattcactgtccggcatatcctggagcttggcgtaatatgtagctaatgttgtacccataatctgttccgttatttattagtctcaaatcaataattattagcagtcatctgcaatttaccataatacttccagagtgattctcctactaccgggagtgttgttgcacgggaagccgcttctttctcacgctcgtaatgtcgcactgcggcagcaatgacagccactgtcggatctgtattctgacgacgtttcaggtcttccttatcgaagcgtgtatcaataaacgtcgtgtcatattcacctttcaggaaagctgcgttcttcaatacacgttgatggaaaggaatcgttgtcttaattcccagaatcttatactcgcgcaaagcacgtgccatattggaaatggccgatgcacgggtacgcccccaacaacatagcttggcaatcatcgggtcataatgcagagagacttcaaatccggcataagcggcactgtcaagacgcaggttacgtccctcgggagcttcacggacagtaatcacaccgggagagggcatgaagttattctccggatcttcggcgtaaatacgacattcgatcgctgctccgctaaactcaatatcatcctgtttgtaaggtaatggatttccggcagcaacagttatcatatcccgtaccaagtcaacgcctgtgcactcctccgtcacaggatgctctacctgcaaacgggtattcatctcgagaaaatagaagttctggtccttatccatcataaactccaatgtcccggcactgtaataacctatttttttacaggcttccacggctaccttcaacatcttctttctcgtctcctctttcacaaaaggagaaggactttcttctatcaccttttggttacgacgctgaatggaacattcacgttcatacagatgaacgacatttccatacttatctcccatgatctgaacttcgatatgatgcggattctcaatatatttttcaatataaaccgcatcattgccaaaggatgtccctgcttcggattgcgacaaacggagagcagtttccacctcttcttccgtacgtaccagacgcataccttttcctccacctcccgcaagtgctttcagcataatgggatagccaacttcattagctaccttcttcacttcatcaatgccctgtacgggtgtttcggttccgggcacaataggcaatcctgcttcccgcataatcttacgggcctccgtcttgattcccattttggaaataatatccgcactcggtccgataaaaatcactccctcttcttcgcaacggcgggcaaaatccgcattctccgacaggaaaccatatcccggatgaatagcggctccggtctttttggcaatggacaatatcaattccggctttaggtaggaggtatcttcgggcgattcggagatgcaataggcttcttccgcataacgcacgtgcaaagctccgcggtctacatgggtataaacagccactgtcgagatattcatcacccgacaagtccgaaagatgcgcatcgctatctcaccccggttggctactaatattttttttatcataatctttttctttttagaagtcaaaacttaaaagagcaatttaataattttaggcacggatttaatccataaacaggcttacagcggtagattagaatgtttcttaggaggattcgactgccgtttgttggcaagcatctcgaaacttcgaatcaaccgcaaacgggttactgccggatcgattacttcatccacatatcccagttccgccgcccggtaaggattggcaaactttccgcgataatcatcctgaagttctttccgtttctcttcgggtttctcggctttatctatttccttacggaaaaggatattcacagctccatccggtcccatcaccgcgatttcggcggtagggaaagcaagatttacatctccacggatatgcttggaactcatcacatcgtaagcaccaccgtatgctttgcgggtaataaccgtcactttcggcaccgtagcctcacaataagcataaagtaattttgccccgttacggataattccgccatattcctgatcgattcccggaaggaatcccggaacatctaccagtgtcagtaaagggatattgaaagcatcacagaagcggacaaaacgggcggctttgatagacgcattgatatccagtgtaccagcaagcaccaatggctgattagccaccactcccaccgtttttccattcaggcggatatatcccgtcacaatattcgcagcatattctgcctgaagctcgaagaaactattatcatcagccaccgcttctatcatctcttttatattatacggctgattcggattggacggaatcaaatctgccagttccggagtcaggcgagtcggcgaatcgctggtcgctacaaacggaggctcttccatattattccccggcagataggagatcaattcacgaatataattgatgcactcaatatcgttttccgcagaaagatgggctacaccggactttgtcatgtgcacgcctactccaccgagttcttcttttgtcacttcttcctgtgtcacgcttctcaccacatccggtcctgtaataaacatataaccggagtttttcaccatcaaaataaaatcggtcaatgcaggagaataaacagcaccaccggcacaaggtcccatgattgcgctaatctgcggaatcactccggatgccatagaattgcgcaggaatatctcggcatatccggccaaagaacgtactccttcctgaattcgtgcacctcccgagtcattcaatccgatgatgggtgctcccatctgcatggccatgtccatcactttacaaattttcttagcatgcgtttccgaaagagctcctccaaatacggtgaaatcctgtgcgaatacataaaccaggcgcttgccaatcataccatatcccgtcaccaccccgtctccggcgaatttctgcttttccataccgaaatcggtacaccgatgggttaccaacttatccagttcgataaacgaacctttctccaataataaatcgatgcgttcacgggcggtcagcttgcccacagaatgttgtttttcaatgcgagcgtctccgccgcctttttctgctttcctgttcagtacttccaggttgctaataagctctttcataggctgtaattattaaagttgtatgtgtgtgtaaaaataaacagtaataaatgaaatcattgtcatattgattacacaaaggtacttttatataatgaacgcatcatgcgtggaaattgttagcatttatgccttaaaacatctttatccatttatttagggagctttttttgcaggttgcgacaacaaacttccccgcttttctgtttatcgcttatcatttttaataaaacctataccctaacaaaatgagaacaattaaaatcttattagcagccggtttcctgctcgtgttcggtacaagtattcatgcacaggtacaacggaatgaaacctatctacccaaatttgccatcaagaccaatgctctctattgggccacttctacgcccaatttaggaatcgaagtgggattggcaaagaaactgactctcgacatatccggtaactacaatccgtggaagtttggtgacgaccgtcaaatcaaacattggctcgttcagccggaattacgctattggctctgcgaacgtttcaacggaagtttcttcggtttgcacggacattacggagaaatgaatgtcagcaatctgaatatattcggaatgggacatgaccgttacgacggcaatctgtacggagccggtatttcctacggatatcaatggatcataagcaaacgatggagtatggaagctaccatcggagtgggatacgcccgtctggaatatgataagtatgctcgtggtgacggaggtgaaaagttgggacataacacccgcaattatttcggtccgaccaaaatcggtcttagtttcatttatgtcatcaaataatcgaactctctaaaacttacaatgatgaaaagaaaacttatttatctatttatagcttttgcagccgccatcctaccggctcatgcacaaaaattcctgaacgatgcgctcactctctcgaacgtatctttatggcaacaaggtaactctctttatgtcggcatgaccttcgacatgaagaatctgacaataggttccgcccgaagtttaagccttattcccctgctgacggacggacagcataatatacccttgcaagaaatcatcgtcaatggtaaaagacgcgaaaaagcatatatccgcggtctggcaatcactaagcaagaacctaccgccattatcgttccttataataaaagggaaacttttaattatacgcaggtgattccttacaaaccctggatggctaatgccagtttacaacttgtagagaatctatgcggatgcggcaattatcaggaaatgaatgcacaggaactgattaccaatgatgtatctaccgaagccaaacgtttaagtgccatgtctcctatcattgcctatattcagccaaccgtagaagtggtcaaaaaccgtagcgaacaatatgaagctcatctggattttccggtcaacaaatcggtgatccttaccgacttcatgaacaatcatgctgaattggtgaatatccatgccatgtttgacaaaatacagaatgaccggaacctgactgtgaaaggtatcagtatcaaaggtttcgcctcgccggaaggacctcttgccttcaatgaacagctttcccaaaaacgtgcggaagctttgaaggattatctggttaagaacgaaaaagtgtcttccaaactatataaagtgactttcggtggagaaaactgggatggattggtaaaagcactccaatcttcttcgatgaaggagaaggaaacattcctgaacatcatcaaaaatacaactgacgatgccaaacgtaaacaggaaatcatgcgtgtaggcggcggagctccttaccgtaccatgttgaaagagatttatccgggactgcgtaaagtgaattgcaaaattgactacaccgttgtcaatttcgatgttgaacaaggccgcatcattatccgggaaaatccgaaatatcttagtctgaacgaaatgtatcaggtggccaacagttatccgaaaggcagcaaggattttgttaatgtattcgatattgctgtacgcatgtatcctactgacgccgtagctaacctgaacgcaggagccgtcgcattatcacaaaaggatttggatgcagcagtgaagtttatggagaaagccgatcacaatactgccgagttcatcaacaataccggagtctacaatttccttaacggagacattaaccgtgccatggccgcattcgagcaggcagcaaagctaggtaacgaagctgcccttgccaacttaaaacaattacaacaaattttaagtgtgaagatgaaataaacagaaaaatctatttattcaaccgaccaaagtggggcgttcgtttgttatatcaataataaacgacgttccactttttaaatctgataattatgaccttgatccttgctgttattccagtgttactgttgattatactgatggcattttttaaaatgtcaggtgataaaagtagtatcatttctctgattgtaacgatgctgattgctcttttcggctttgctttctcggtagacaatctgttttactcctttttatatggagcattaaaagctgtctctcctatcttaatcattattttgatggctattttcagttataatgtattgttgaaaactgaaaagatggagattatcaaacagcaattcgcatctatttctaccgataaaagtattcaggtgttattactgacttggggatttggaggtctattggaagctatggccggcttcggaacagcagtagctattccggcggcaattcttatcagtctgggattcaagcctatcttttcggcaacggtgagtctgattgccaatagtgtagccactgctttcggagcaatcggaactccggtattagtattggccaaagaaacgaatttggacgtattgcatcttagtacgaatgtcgtattgcaattatccgttttaatgttcctgattccgctggttctacttttccttactgactccaaacttaaatcgctcccgaaaaatatattcctggctttattggtaggcggagtctctttagccagccaatatgtggcagcaaaatatatgggtgctgaatctccggccataatcggcagtattctttctattatcgtaatcgttatttatggaaaacttactgcatccaaagaagagaaaacacgaaaaagtcatctgaaaacgaaagatatattaaatgcatggagcatttatttactgattctgtttctgattattctgaccagtccgctctttccgggattgcgtcatactttagagaacaattggattacgagaatcagtctgcctatcaatgcgtccaccgtcaattatactatttcctggctgactcatgccggagtattgcttttcatcggtacttttatcggtggattgattcagggggctaaagtaaaagatctgttcatcgttctttggaataccgtgaagcagttgaagaaaacattcattacggttatctgcctcgtggggttatctactattatggatagttccggaatgatcgctgtgattgccacagcactggctacggctaccggaagtttgtatccgttatttgctccggttatcggttgtctgggaacatttatcaccggaagcgacacctcttccaatatccttttcggaaagttgcaagcaaacgtggctgggcaaattcatgtcagtccggattggctgtctgctgcaaatacagtaggtgctacagggggtaagattatctctccacaaagtattgccattgctacttctgccggaaaccaacagggaaaagaaggtgaaatactgaaagcagctattccttatgctttaatatatgtggcgattacaggaattattgtttatattttcagttaattaccctaaaattgaagaagataataatactgttaacaaagcgtgataatacttccgcttaaccattagatattaaaacatttagctcgtttttgcacggttttgattcttttcaccacagaggacacggaggacacagaggtgaatttggtttatgacttacggttgtgaccctaattttgatgcgtaatcctcctactataaagttgaaaaaatatgaaaacatctgccacctgcaacgaaaagcgcgtaatgcactagttgataaatagttggagcgttgcagatacctgcggcagataggttgcagataaagtatctgcaacacagtataaaccttacataagctaattctccatgagtgcagaagtttattgtatacattaacttcccgtttccaggcggggaactgtcgtttccggcattagaaattacagtttccacagcaggaaacgagagtttctaaggcgggacactacagtttctacgtaaggatactgtcgtttccccgtagagataccaaaatttctccatagagtcaccccaattatcccatagctttgcataaaggaatcaaggctttttctttgattatataacgtgttgcagatactttatctgcaacctatctgccacaggtatctgccacgttccaactatttattaactagtgtattacacgcttttcgttgcaggtggcagatgtttttatgtttttcaactttatagtaggaaaaactttcattcatttccgtaccgtattgtgaatactactaaaaaacacctagcagtttaagcagatgtacttggttaactatatacatcttgagaatgtaaaatatttgcagaaacgacttaatgcaggatccgatgaagaaaatagcagtaaaacactgatataaaccggttcttcttggtagaaaacgtacgaaaagtgccagaaataagcaatcacctttactacagcattagcgtagtgagggtgatttcaacttattctctctcacatctttccttgaaactgttaaatataactacaaataatttttaaatatcttatctattatacttttctgaagcatcacttccataacaggtgtttctctatcatatttataatatctcttatctttacgcacataaatatatctaatatactcataacctgtagcacaccattcctcaatatcaaatctaatatcatcatattcgaaaggaagcactaatctattatttatatcaacagctccatatttactatccttagttactattacaacatctttagttacataatccaaactatcatattctgtaggaagtaatactttaccgatataatcaataattcccacttttttatctttcacaacataatgcgcggaaggcccatattcccaccatgaagaaatcgaatcatactcgcagggaattagctgctcaccatccttcatcaccactcccaccttatcctgcctcttcactacaaggctttttcagccaagaccaaattaaagtcatcatcagctgaaatttcctgtaattttccaaagccgaaaatagtatctcctttattatccagccaagcataaccacgttcaccacacaaaataacgccccatttcccttcctgaatatatatgatatcgttctcttcttgtgcatatcctatagaagatactaataaagagaataaaagtaaaatataagttttaactatgtgttccatgatatcagaattacaaccatcataatattctcaaatataacggatataattctgatacacaataattcttctaacaaataacaattctatttctcatcatcaaatgagtggctctagaatcaacttttcacgttgcttataccacatgatatacgacttcatgcgcttccgccagttgaggaacctccagtttatccaacattttatctaaaacagattcaggaagtgcatattccctgcttttattttgttgacgccaaatgtggtatggttgttccagatagactatctttacttttgcaccataatcaacaaacaaatcaatcaattgagcacgcatctgacgagttatgttagtagcattccaaacaaactcctgacctttgcggagatacgttctggcttcctctttcgctgtttgcactacccatccattcgcagacttatccgtaggactcaatttgtgttttcgacgaatgacgtccaaactcaccaccggaacatctatgccagcagattgaatataataatccttccccattcccggaagtcctgacaacatcgtcacttcacatttaaactgttcgtgagggacataatcaatataactgtcttcagtatggaagtaatgaaaacgtgcataatcagtggcaaattctcttggtttcttccaacaatcctgttcacggcagaaaatctcaaacagttccagtgcttccagcagttcattcttatcttcacaaatgcgtcctctgatatcagcgtcggccaacatctttagtaataaagtatctacccgtaaagaagcttcacagagtttcttcacagagtcaggcttctccatcagccaaacaggtaatccatggtaccggactaaagatgcaatctgttcccggatatggaatggagcaggacaatcccggtataaaatagtgcggacagtgtactctccttttctggcatgtcctttagcagatacccgcccctctccttcatccacggaagttgaacgtttttcaacatcatgcaacaaggcagatgtccaaatgatttctttctccaaagtagaaagagaatgataagcggaagactgctgcaatgcctccaacaccatacgggtatgttcggctacacttccctcggcatgataacgaatatcctgctgaacagtattcatttcgcgcacccactcgaactgttgttcgagtgagcaccacgatttatcttctaccaatttccaattcatctttattcctccttttcattattaaattcccaaacaagcggggcacgcttccagttacgtgtccaatgctcatctgttttaacatgtcctttccgcacatacttaaatacattatgtgcaaattcgcttaccggatattctccgacattgcggctgactactccctcacgggtacaaacctctttcgtccacggatcacaagagccgaaaatagccggttcttgtgacatacggataatttcctgtttcaaaagttctggtgtcaaaccggaaacaggctctatcttcaactccggaacagtaggaaggtcaaataaagctgcataaaactttacttcttcccatgacagccactgatccatacaacgggctgcaaagacataaaaatgcgtttctaatcgctgatattctatggaatgcacagcatatagattctctccaaagatttctatatcacccaaatcattctttatcaattcccaacgctcacgcagttgcctcgtccagggtgaagtagtgggagcagcatgcgaacgggcgaaaacgccccactgacttaaacaattattctctccatccagcttctcggtatgcaccaatgtccgaatccgttggatgtcctcccaatacgtatggttaatccggtcgtcactagtcgttccgggagagaacggatagtgataggtgcgaccatatttctctgatatcattttcttcttttaattaaatactaatttctttcatcgcatcactccttattcattcgaacgattcgaggcataaatttaccttgcacttctaccagtgtctcctgcatatacatcactctgtcaatgtccttatatgccagtggcatttcttccacgctcccaccaatcaaagtcactcccgcctgcgacagtagcttcttcaaagccgattgcgtaaaactatcttttgccttctggcgggacatcgccctgccgcctccatgagaagccgaatttaaagcagcttccatccctttgccacaaaccagataaccggcagtagccatgctaccgggaatcaatcccgcttgtcctttctgtgccggagtagcccctttacgatgtacgattgccatacgccccggtactatttcctctctccaagcgaagttatgatggttgttgacattagcgagcggcttcaaccctaatgctttcgccaaattcaaatgaatccgttcatgacaggcacgggcataatcgcctgccagattcatactcatccaatactcctgccccgcttcagtgtttaaatccagccaggcaaaatgctgtgcttcacggggaagcctgcacacctcacgtgccaacaggctgtaatgtttggcaatggcagctcccaatcctcgtgaaccggaatgtgacaacaatgccagataatttccttccggaagattcaacacgttattttcttgcagagcgatctcgccgaactctacaaaatgattgccaccaccagaactccccagttgacgtactgcctttccatgcaaatccctcaacaaaggtgtcaaacggaattcttccctatccaacacctcatgttcctgctcaaaacccaatccgccatccataccgaaatgggtgaaatctttcaaggcttctttcatctgataggtacatcgtttcaggaagtcggcgctggcatcaaataccgtcaggctcatccgacaaccgatatcaacgcctacggcatacggaatcactacattatccgtagcaagcactccaccgataggtaacccgtatccggcatgagcgtcaggcatcaatgctccgaccaccgttacaggtaagcgcatagccaggttcatctgttgtttggcaagcgtttcgataaatttacctccataggttttatacctcaacggctcatccaataaatcataagctataaactctttcgctattatagtaggcgaaaggcgttcggccagcttattccaaatttcattatttttgtaagattcgggatgctcgagtatatcgctcaatgtcatttcaatctgttctttagtgtcgtatttgcaatgtttgctcacaatgtccactaccagactgcgggcaacattatcccggtatcccagtttgcttaaatcttttaatcgtattcccatactcttttttcgttcgcatacagcattccctgtcggcctcaccggcagacaacaatgtaatacacgtgataccaatgctttggatatggatatgaaataccccaccaccgcattaaagtgattaatttaaaatataaaaagtgattgcaggactaatcaaccattaccgcttgttagtagaattgcggtcaatataagaaccataggttcagtgtaaaaacagtaagttgcaaagcctcatcctctcgatgagacaacttagtcctaatttgaaaatattatagctccaacataattaataccctttccatctgtttttaaagggtgaatactcattttatcgcggcaaaattagtgcttatttttatttcctccaaagaataatagacaaattttagcgttcggtaactatccgagggaagttttgccaagagtttctgtcaaattgctattttttactccctttatatcccctatctttgcaacatagaaaacaaaaagaaagaatagtatatgaaactaatgaaaggtttattgagtgcctttgccgttatattggcaaccacagcttgtgcaggcaacagcggagaaaataaaaagagtaatgaatcaacaaaggaggataataaaatggaagtagtagcattaaataaagccgattttttaaagaaagtatataattatgaagccaatccgaacgattggaaatttgagggcagccgtcctgctatcgtagatttctatgctacctggtgcggtccatgtaaggtgatgcacccgattctggaagaacttagcaaagaatatagcggtaaagtagatatctaccagattgatgtggacaaagaacaagatctggcagcggcattcggtatccgcagcatccctaccctattgatgattccaatgaaagaggaacctagaatcatgcagggagctatgcccaaagaccagcttaaaaaagcaattgatgaatttcttctgaaacaaaataacgaagcaaagcaatagacttcgacttttttctcgtcatggcaactgccctctattcgtcttttgaagatggatagagggctagttttagttaaactcattatagtttcctctgaacaccgtcgtcaccaacgacgtaataaactccattgtctagcaatacagcccgtccacgctttttcttccgattctctttattgtcaacattaacagcgatgactttaccattataaaaggttgaaatatccttgaagatagtgtgccccacaaagatatgttttatcatataacgatccaacatcatttgtaaagagtcttgtgccaacggtttatatttgggatcttttctcaccaggccgcgataccagattggaccgtcattaccatacagaaaatcagtcaatggagaaagtgccttacgctcttttttgctcatgaaaagtgcccggctcatttcctcgttcacagtggggatattcaagttcttatcatagaataattttcctaatccggcatgcacatataaatcagttccaatgatttgcattgtattacgtgttgcaagccaacggcccaattcggtatttgtgccgaataatgagggatattccactcccagtttttctgccagcaatttatatttatcttttgtatagcgaagatcgttggacaacaccagagcctcatggtttcccaaaaggaaagagacatgacctcccgctttagccgcttcgtcttctaatttatagaacagccagaagatctgcagtacatccttgccacggtcgaaaatatctccgataatcaccaaatgattgctaccgaaattccattgatatttatcattaatcactccgtttccttgcaacaggctaatcacacaatccagccgcccatgaggatcggacatcacaaaaactttttccggacgggtatattgccactccggtcttttcaatggatggagttttacatcaaacggataccgtccctcatgatccgtcacacggaaactgaaatctttaggtaatgtcgcataagtcttatcggtaatccgtcctttcttattgacattaataacccgtgtactaccgtctgcctgatagagtatatagggtccgtcaccagacaatttctcttttttttctttcttcttatctcctgaatgataagttccggcctgaatgccggaacttattaaaacgagaacaagagtagaaagaaataatctcaaaaaacgagtgctcatattcttttcttgcttgaagtttattttttaatcgttactaattctccttcgtcattgatggctttaatatcatctccttcaataaccacagcacgagtctctttttcaaaagccttgggatgattaacacaaatatcatatacctttttattataggtatacttcacacgactattttccgtatgaccgataataatacgtttgacatcatattgagccagaagtttatctacatccgcttcctttatcggactgtactcactgccagtcttaaccattccacgataccacaacggaccgttataactatcactataaaggaaatcggcaatatccggatattgttttttccgttcctcttttgaaaggtaaatgctcttgctcaccagttcattgatttcgggaatcgtctcttcgcgttccataaacaccttactcaatcctgcatgaacataaaggttttcacctacaatctgaatggtgtttttagaacgcagccagttacccatcacattcgtcagtccccacatctttccataggtcatgttcatcgctctttgcgaaagagtgttgtacttggcatacgtatatttcaagttatcacgcattatcatttcttcgtgatcccccaagatggttgtcactctgccaccaacagctttcgcctcaaattccaatttgtatatgagccataaaataggaagtacgtctgctccacgatcgaaaatatcaccatcaatcaccaaatggttactgccatatatccattcatatttatcattaatcacttcccctgttttcagaatagcagcaaacaagtcgaaacgcccgtgaaggtcggatacggcaaatgttttagcatactcggtacggtcttcccatgccggacgttcaaaattctcaatcttattaatgggtacctgaaaaaggagttgattatcatccgaatacacatccagtttcaatccggccggtaatccggattcttcacgaatgttcaatgcattatctttagtcacttccagaattttaagtctaccgttttcatagaaaaggtaaggaccatcattacggaaatgagtgatttcagctatatccggtcccacgggagtcagatcttccccgcacgaataaaaggccgtgatgaacaaacccaaaaggaaatagatgctatatatctttttcataatttctatacgttaatgcgttaattaatgcaattcatattccggattctgaaccatattctcattgtactccatttcgtggttaggaacaggaagaacgattttataataactccaatcaaactctaccgcttcattgggaacttcgctcaaataatcttcacgtatcactttcttgttatttctaagtaaatcaaagaaacgttgtccctctccccagaattcaatgcgacgctgttcaagcaccagatccagatttatatcttcatctgccacggcatccagatccttacccgtacgtgcataaataggtttcagatacttgcgcgtattaggtatatcattcctcttaatcgcagcttcagccgcattcagatagagttccgacagacggaaaaccgggatattggcatcttcatacgatttagaaccttgggccggatatttcaagcaataaggtttactgctacttgccgtagacaccatctgactacgaacatcatcggaattgtctttcatgtagtctttccaatacttttcggtagctatcagattatatttggtgctaagataaccgatggatgattttcccggactatcagttgtcagattcacaatttcgaacaacagttcactattgaacggagtagcccatatcttggcatattcatcattggtccacaacttatagccttgtttttccgcacctttgatagcttcggcagccacatcgtatgcctctttgtcattccccatatagagataaacccggcttaataatgtcattgccccccatttattgatcttaccctctttctttaccggacgaagcagcttcaccgcatctgtcaggtcgtctgtgatggccttataacattgggcggtcgtattgcgggaaggtttgatattcttatcttctaccactttatcaataatgggcacagccagtgatgccccgttatctttcagataaggatacccgtaaatacgtgtcatatcgaacagcaacaaggcacgtattgccaaagcctctcctttcaagtcattataatactcctgctctgtcagcttctccagtttcggagttgtaatttcccgatcgggaacaagctttatcttttcaatatcccggaataaaatgttcaggttcttaccaataccgtagtacatcccccagaaaccactaggtccattcgtcttattgtacttgaatgtatagaaactgacattggtgctggaagacttataagatttcatgtcatctcccctcaaatcaccataacagaacatatctgctccataataactggatgactgcatactgctgtatgcaccgttcagcacaaattcaaaatctcttaattcgatcaatgaaccatcagtttctatagctgtggaagattgcaaatccaaccaatcatttccgcaactactcaataaggttgcaaaggcacctaaagctatatattttatctttttcatacttattcatttatagattaatgcacttagaatttcacttccaaaccgaatgtataagttctcatcggaggagtatcccaactaggtgatgaacccgattcggggtcaatataatcgtatgccgcccaagttaacaggttattgcccgatgcatacagacgtatattgtctatacccactttccgggtccatgtcttcggcagtgtaaagccgaaagtcagattcttcagacgaacataatctccactgtataaacgacgtgtggtagcataatcggtcatggaaattgatctaccgactacaaaacgttcaatactcgtttcatcaccctctttctgccagcgtttccggtaataaataggaatattcagcgttccatcgccaccgtgttccagtttgcctgccgcgccgtcatagttccatgccccaaaagagaaattcacgttaaaattcagatcaaaccacttataagagatgctgttacccagtccaccggtgatagtaggatcggcacattgcagtatcactttttccgcactacgcggatctttagtagtttctttgttcagatttccattttcatccgtcgtattcttatagaacatcggttcaccgtctaccgggtcgatgcctgcaaattcaatcatataataggtagaatagggcaaacctaccttatgaatagatgttccgctggttacttgtttcaaatctccgtccaacttcaggattttattggcattatgtcccagattcaaactagtgctccaacgaaaatcttttgtctcgatattagttgaacgaatttccaattcatatcccttgttttgtaatttacctatgttggcaagataacttgagaaacctgttgcaagagataatggccggctgtaaagcagatttttcgttgtacgaacgtaatattcaaatgtaacattcagtctgttgtcgaagaatcccaagtcaataccggagttgaagttatagttggtttcccaagtcagttccttgttttccagttgcgactgcgtgatacccggattatcgttataattactagtcagactgctcaatcccatatatccataataagaagacggcagagttccgttcacaccgtaagaaactctaagtttcaagtcacttaaccagttctgaagaggtttcataaaactctcgctactcactctccatgcaccggacaatgaccagaaatttccccaacgattctctcttgccaatcgcgaacttccgtctgttctccaactcgctcccagatagtatttgttgtcataatcatagttggcacgtgtaatataagagacaatacgcgtcgtactgttagaacctcccatactctgatacactacaccattgttgacttccggtttatcccagcgtgcaaaattagagatagtagttcccagtccatccgactccttactgttgatttcataaccagccaaaaggtccagattatgttttttcttgatctttgtctgataagtcagaatattagaccatgtcatattggtaatatcattataatctttgctgaaacgtccgttatcatcgtcaccgtcactggtacgcgggtctttccatgcacgagacttgttcatcacaaaatcataactgaatgtagacgcaaacttgattcctttccaaatatcgaatgatgcatatacggtattgaaagaacgggtcgcatattctctcttaaaattataagaatttgataacatcggattacggtcatccaatttgattaatgcacggttccaggtaccgtcttcattccatatagggtcagacggtgtggctccattacgcgtaccgtaaattggagaagtatacgatgtcccttccgaataagtatcctgattcactttggagaactgtatctttgcaccgatattcatccatttagccatctgatagtctacattcaaacgtgcagaaatacgttccagaccggagtttatcgtaacaccatcctgcttcatatagccgatggacgtatagtatttaatcttttcctgtccgccggaagctgaaaactcgtaattctggtggctaccgttacggaacagataatcatcccaattcacaaaaccacaccaagggatcggtgcatactggtcaatattcgaatcggcataagcccatgcttcattctcggtcatcccctgatgaagtcctacctcatcatcggtcttaccactataagttaaagcataatttcgaagcccctcgtggatcaggttacgacgttcctgtccgcccatcaattcgcggaaaggcatggcaaaattagagaatccccaatccgatttcaatttaaagaccggtttacctgcttttccttgtttcgtagtaataatgacaacgccatttgctgcacgtgaaccataaagtgaagcagcagcggcatccttgataacagtgatgctttcaatatccgatgtattcaaggtagacattacatccaaaccggaatcactaccagatgcaccaatattacccgacaatacgggaacaccatccactacatacagcggagaattggaggcattgaacgaacccataccacggatacggatggacgttgacgaacccggtatacccgaaccggtatttacgctgacaccgggagccgccccctccaacatctgttggaaagatacattaggcacatctttcacagcatctgtctttacgatactggcagaacctgcataagccgatttcttgaaagtaccatatcccgttacaattacttcgtccaacaggttattatccactttcaggattatgctcatcggcttgccgggagttgcaactacctcctgtgacgcataaccgatataagaaaccatcagagtcactttcttgtctgtaacttccagatggaaattaccatccatatcagtcatcataccgttagttgtacctttcacgatgacattagctccgattatcggctctccactatcttcaattactttccctgtaatcgtatatttctcacgtgcaacagtttccgtcctaacgggttcagccttacggatggcaattactccatcatgaaccgtataagtcagtccgctatttcgcaggcatttgttaagcacttcagaaatcagttcattcttcacatccagattttccactctgactttctttgcatcatttgtgctgtagataaaggtaaagtccgtttgtttctgaatttcccaaagaacttcattcagtgttacatttctgaatttggctgtaaccgtggtctgtgcgaatacagatgcgcgcatcagccctgaagtcgtaatacagagaaaaaggaacatcatacaaagacgttttccatatttcccaaatctggcaacattacgtagtttttccataaaacagggattaatgattagtgaatattttgatagtttttccttctactgtgacagttactctacccgtttgctccaacaatttcaccaatggggtaatctcattatagcggttaacatagcaaccgaagcgtaactctttcgtcgcctcattctcatagactacatccatatcataccatctggcaagagttttcatgatgtcgtccaatcgctggtccttgaaattgatctttccatgtatccatgaagtataaaatgcagtatctacattgcgtacattgatctggttgctgcccggagtaatacaagcctgttccgatggtttcagaatccggttgcttccattttcagtctgtacttttaccgaaccgctgacaagtgtagtttgatattcttcgtttgcgtaagctgatatattaaaagtagttcctaatacttctattttcatccctttggtttgtacaataaaaggctgtccggttttgcttacttcgaaataggcctctccctccaattctaccagacggcaatcctgtgcaaactgaacagggaaacggatggaactcatagaattcaactgtactttacttccatcgctcaacgtcagctgatattcaccaccacgaggaacgtttaccttattatatgcaagtttttcggatgtccgggcgggagcctgctgataattcaatgctgtagaatccacctgaatgactgtaccatctttttctttcaattccacgccggaggtagacttcaaatcaattgcttctccattatccagaataagaacggctttcttaccacccggaacaatttgtttcgctacttgagataacggctggggttcattaccgctcttatatattgccacagtagcaataaccaccggaaaaatgaaaatagcagcatatttacatatattcagtatccgatgtctgaaccgatggcgttggatttttctttgcactccctcccatccgtcctctgtatggaaagtttgccgcttctgcatattctgctttatgttctcttccttgcagatttcccgaaaaaggcgttcgttttcgggcgattcatttctccaccgggtcagttctgcctgttcttcttcctcgatttcatcagataagtatctggcaatgagtcttgcaatatagaaatgttggtttatcataattcacatgttttaatcgttgtttatactaaaacaggtgaattgaaaatcagggtgtattaaaaatgattttttttaaaagaaactataaaaagtaaaaaaccaggtagtaatagtctttcaaatatacgcgtaatttacggtaggcaatctttttctgggagtgtaccgtttcgccggaaatattcagtgtttcagcaatttccggattgctttttccctcaagtgccagttgcataatgcttttcatctgcggtggcagtttttcaatggcatccactaatatccggtaactttcttctgctatgaccttgtcttggaaaaaagagtctttactcatttcctgaactttctgtgcatactcgttcatgaccttggtatgttccagttcatttaaagatttattgcgtaccgacgtatagaggaatgatttaatctgatgcacatacatgaaatcatcgcgcaactgccacaacttcacaaaacactcctgaacaatatcagccgctaatgcatcattttcgacatactgattagcaaacatacataaagatatgtaatatttgtcgaatatagaacgaaactgcgtctcatcagttaacttaatactaatatagtctgttgtgccaatcacgtattctttattttggttacaaatataccatttgaaaattatgtaaccaaacaaaaatgaaaaatcacaatctttgtttcattacaaaaccctcaaagaagtcgtcccgataactattaccgatagcaatttcatacgattttataaatatatcattattgtcaaatgactcgatgtgatcggtattgacgatataggatttattcacccgcaaaaaaatagattttggtaataaatcgaatatggctttcaggctcatgcgagtaatgatacgctggtcgttcagttgaagaatgacgtaatctttcaatccctcaataaagagaatatcggagaaattcaccttgaaataccggcgctctgcctttacaaagaaatattcagcggcaacaatcgtttcgatagcttctttttcttctttcaataatagagaatgataggataacgctttatccaccgccttttgaaaacgttccgcttcgacaggcttaatcagatagtcgattgcatctacttcatagctatccaacgcatattctgtataggctgtggtgaaaataaccagtgtctttttggaaattgtacgggcaaactctattcctgtaatcccaggcatctgaatatccagaaaaaccagatcgactccctgttgctccataaagtcggaagcagttgcagcactgttaaaactgcctatcaactggaggttatcggattcttctatcaataacttcatggcctcacgtgccaagggttcatcatctacaatgatacaattcataatgttatacttaaaattacaaaatagagattttcatcttctctttgttccaacttataatgttcaggatacagtaatcctaacctacgctggatattggcaagtccgattccaccgactttaccctgctggactgcaacagccggtttagaattctcacaccggaaatccagtcggtgagcatccaccttaaaaaagacatggacatacgaagaatgctcactatcaaaactatgtttcaccgcattttccacaaaaggaatgaataacaaaggctgaatccaaatggaatccacttctccctcctgcctcaacgtaaactggaaattgtcacggcgtatcttttccaaattcagatagtcattcaggaaacggatatccgaagccaatgaaactctttcacgcgaactgtcgttaatctgataccgtagcaaatcttccagtttaaaaagtactttggaagcttcttccggatttctctttatcaggacattggcattattcagcatattgaaaagaaaatgcgggttaatctgattcttcagaaatgtcagttcggattgcaaagtagtggactcgagttcgtcaatacgcagattataacgcaaccaatgggtaaacaaggatatggctgccgaacctgcggtaacaaaaccgatggtcagtatccccgaaaaagtattaatgaaagtagcgaatctgccaggatcttttccgggcagaattacttcaaagagtaatccctgggtgactgaaaggaagacgatgactaccaaattcgtcaggacagccgccaggacatagtgccccaaacggttcttcaacagaaaacagggtactaatatatacaggttcatatagattaccgtattaatggaaacaaaatatgccaggaatccaccaaaacgccgccaaaaagaaactgactgcaaaggttcgtaccaaaagacattaatagtcatcaaaagaactattatttgcagtaacagatgtctacatgtccggtaatgaggacttaacagaaaagctgtgacacttttatcttccattcttctatgttctgtattcaggttcatacttcacctcctttcaattccaaccagatgctttctgtcgtcaggaatagtctgtaacgattgccatataataagttcagtctttggcggattctttcaagtcctttatcttccaaaagattcacttgtaggcaaagacaagtgaatataattgtgttctcttctactttcaaatggattttgagagaaacagggattgatgttcgctgttcgttgattgattttacaatatattgcacaaatggaatgaaaagcaagggtggaaccagtgttctatttacttctccatccgcaagcagttcataattgaattgtgcctgagaattctgttccaaggtcaggtaattattcaggaaattaatttcactactaagcaatacctttgttctgctgcaatcatatagctgatagcgaagtagttgacttaatttcatcagcatcttcgaagctttttccggttcgctcaatgtcagttcccccgaatgatgcaatgttttgaaaagaagttcggggctgacttgttcttttagctgttccacttccgaaagaacgtgaaccttttccatttgtgagacacgttgatgatctatcatccattctttcaggagaacggtcattgttcctcctatcatgcagagtgtggacaacatgaaagaagatatataatccatcactataggtatggagaaataggaggcacgttcgtaaaattccggccagcaggaataagatacatattccgttgccatttgtattgccagggcaagcatcattgctactgaaagtaaggatatgtaggttagatagcgtcttttcagcaaaaactttggaaagagccagaaaagattcagataaataactcctatataagtcagtagatataagaaagtgaatgtataaatccatcctcccaatatatcccgataatcgaggaatataataaaaacctgattgaatgatatggtagccaacaccataataagcaccagataacgcgcccatcgaagttccggactaacgaggaatcgatataataaagtagatttattgtctgttgttattgtttcagccatcgtgtatttaatcagggaagatgttttatctccggggacgaagataaaacatttttccggttggacttctatatcggttatttaaaattcaagtttataactcacatttgtcaatgttgtagaaccgtcactaacatcaatttttccagttttcacattatattcatgtccatagtgttctttcgcaccggtaaaattaagtcctttcactgcaaactcatgagagactttcttcttgttgatgcggtaactcacggtatagttgccgataagcatgggagaatactgtttagaaaatgctttcgtttcgtcatattgcacctctttatcaggatgattcatcgttgcttccctgtcaatcggagaataccggtcacctccttgtaaggtcaatttcagattgatgctaagaatattctgtctgttacgtcccagcatccattcctttccaatcagtccgttgatgacataattccgattaaacttcgtattgtaccacacaccgtctccgccccggtagcgggaatcgaaaagagaaccggaaatcatgtaatagagccctttttccaggaaacgttctaaagtgatgtcaataccgatgttgcgtcctcttcctttattaaccaatgcgtcttccacatagaaatcagaacggttgagtacggaataagagctgtcagccatcacaggcacatcatggagaaattggatataaggttctattttcagattcatgcgatcggatattttgtatccaaaagataacatgacgtgctgcgctttggtgaaatcgagttccttgttgacggatttgtctcctgtacttttcgttttcacaaaatagacgtccattttctccatgcgactgtacataccataagccagtgcaaaagttgctttcggagtagcttgccatttcaaaccaatacggggttcaacagaccatttattattcagagtcagaaattgcccgtaaataccggcattgagcgtccagcgttccgtcaatcctacagaagaactattgtaggcagatatcagactcgtattaccttttccttgagatacggtttccagtgattcggcttcataaggagcaatggcaagattcatttgatagaacatggcattatacgtaaatcctgtcttattagtaaaacggttactgaatttacggttaaaagtcgaagttagtattaagttagtatgttttgagttaagatccatgtagggggtggattccaaagagtggttaaacatggttgctccaccgtccagttgcgaataagtaccggcaatagtggttttcagtgatgcgtcattgttgaagaaataacggtggctgatacctccggcagccatatactgtttgtcttttgattcgctacggtcgctcatatattcccatttatccgtattcttttcaaaatcactgccgaatttatcaatcaggctggttccccagacagagaatgttcctgctttctgtgtcgggaaattcagtttgaagttcaagtcctgatagtccatctttccgccctccaagttcagaagtcctgttgtggaataccgataattgaaaatataggatgctttgtgcttcttgcttaacggtccttcggaagctacatcaattcccatgatgcccacttgaagcgtattctcattcttctggttatttccattacgcaatttcatatcaaacacaccagataccgcatttccatattctgccggaaaagctccggtaaaaaaatcggaattacccaatacctgcgaactaagagatgaaagtatccctccacccaatgtggcaatatccgcaaagtgattcgggttcggaatttcaacgtcttccaatcgccactgcaacagatggggagcattgccatgaatggatattccattggaagatacactgggggccactccggcaaaggaagataccaaacgggcagggtcgtcaaaacctccggcatagcggctcgcttcttccacactcaacatacgggctccagtagtagccatcttattcatcgcttcctctttattggtcctggcacgaatcactacttcattgagttcgtttacactttctttcaaaggaatttccaaataaacctctttggcggaagttaccagtatctctctgaaaatacccggttcatatcccataaaggctgcctctaccgtatgccgtccaacaggaacctgtggtatgctgaaacgcccgagactgtctgttatcgtacctgttccctctttttcggataatctcaccgttgcatacggtatcgggtgttttgaatccccgtcaataaccattccccggattgtctgtaccggccgaccttttctctgcggtgtctgactaaaagccactgcggataccaacaaagcaaccaacaaaagtatccacccgccataacgatgtgtttttcgggttaactcttcaccaagaactctttcaaaggttttgagtactgtgctgcattcatctgcggagatacccgactgaatagatattttttctaataatctagttttattcatcttcatgattttattctgtttttatttcgtcacgaagatagagtatagaagattgccgatttttgaaatgagacgaatacatcccgtttgtagacaaaacacaaaattggtaagacgaaaaatcatccgaactatggaatttcacttaaagaagaagctctttttaaaagacacatcactttcagaacgatttatatcctctaaaagtgatgtgactttttttaatagcacacgccaacctaccctaaaaagtcggtcttatctttatccgtgatctcccgaattactttacatggcactcctgcagcgattacattttccggcacatccttagtcactacacttcctgctccgattaccgaatttctcccaatggtaacaccacccataatatgaacgcctgcaccaatccagacattatcctctattacaatcggatgtgcatagcaacctcccataatgcgttcccgggcatcaagtgcatgatttgctgtgtacaatcccacacgtggtcccaacaatacattatcccctattgtaataagattcccatccaacatgatgcaatcaaaattagcaaagaagttgtttcctatagtgatattaaatccaaactcacaccggaaattgggttcgaagtgaacattctccccaatgcctttcaacaaattgcgtaataatgcttcacgaacctctttgggttttccataagtagagttataatcattagtcagaaaaacgacttgttctcttctctgaaccagttctgtagacaaatcattatacatagtccccgacaacattctttcatacaattctctattttccatatctatatcataatgattgattaaagtccttttgtaatcaccggtaatccgaaaaagcctttttgtaaagtcagtatcttcgatgcacctgccttggccttattataagtggaaagtgacacatgcagctcttccacagctccattctcaaaagctacctgcagatagtattccttacgtatgccatccgaaacataacgatgcctgcctactctacgggtcttcttatgtgtttccacatattttttctgtaccatcactgtttcttcgtgtgtggaagcaggatcggcaaaccaataattaccgccaagaaacaagacataactgatggcaccgatgcaagccagatgacacaaacaattaattactttaccatccacggttgtcagccatatccatttcttatagaatgggatagtaacaagagcaatcaaaagcgccattccaagaggtatccaccaggcagtcagtgtatcttcgtagataacatatccaatgccacacgaagcaataaatatcagaagcatcaaaaagcgaagtatcctaataaatagagttttcatcatatttatacttttatgcgcaaatataaagataagcaattaaagatacagccaaaatcacatataaaaatcaaggttatatcttgtaccttttttctttgtggaaataaaaaaacgaacatttaagctagtttcacgacttaattaaagtacatgtcttgttcctcggtgagaaacacatcgttgcacaccgagaaacgggtcgttccttttaaaggaacggggctttggttttaaaccaaaatacaagtcatataatcaattaaatatcaacaatttaccaaatcaccatttcaactaataagcatattggaattttattgacaactcacgataggatgagaataatagaataacagaaaggatagaaaaattcattttaaacatagtgacggtatccacttatgatagtgacggtatattcgtgggatagggtaaccatcccgaccggatagtgacgctatatttttgcttgggaaaaagcataaaaaaaggctatctatcccagacagccaatcttttgttaaccttaaatctaatactatgaaaaacacattgcaaagatacggactttctgcatatctccaaattttcaggctcaagtagcgtatcttataacatggtttaatagaagtaacagtttcgttaacatttaacataaatccatcggatattaacgaatatccgatggagtagattcagagattactcatatcgtaatgaacgagcaggtttgctcattattattttcattgtctggaaagccactgtcacaaatgaaatgaacaacatcagcaatacaggtactataaagaaccacgctttgagatcggtacggaaagcataatggcttaaccaggcattcatactaaaccaagctaccggaagagctataacaactgcaatcaaaatcaactggaaaaatcctttgaccaactgatagaaaagattccagcgggaagctcccaacactttacgtattcccatctctttggtgcgggtggaacaggaaaacatgactaatacccaaagtccgagacaggaaataaagattgccaatccggtgaacgaaccgatcatcgctccgaaaacctcgtcttgccgatattggtggtcgaagaactgatcgaggaagaaataatcaaagctggaatccgcaaaatactgattccagatctcttgcacttgagataccagttcacggggatttccggaagccatcacaacagagatataacgctggggcaaccaatcaattttatctttatgaatcagcatgataggtgtatagttcttgctcaacgcctgctgatgataatctttcaccactccgataatctgcatcggcgcatcagtacattccactgttaccaactcgcctatcgcctcatcattggaagcaaatcccagattacgtacagctgtttcattaatcaccagtttatcgacatcatcaccatattcttcggagaaacttcttccggctactatctgcaaaccgtatgcatccgcataatcaggatcacaagccagcatctcataaagacggttctgcttcaaagcgtcattggtgcgacgattggaaaggaatgtggccacttcttcgcccggcacggcaccggaaaaagtaacccgatggaccagaggaagacgcgcgattgcttttttcattgcttccaacttgatattctgcccctctgtatgtcccggaaacttaaccactaatgtctggctggttttcactcccaaagattgattgcgcataaaattcagctgtgcaaaaacaatcaatgtaacacaaagtaaaatcatggaagctgtatactggacaaccaccagtacctgacgggttcggtcgcctgacttgctatgcaaaaacttccctttcaacaaggttataggtttgcgattcaacaaagccaatgccggataatacccggaaataaatattccggctataaaaacgagaaccagcaaaatccaccagtaatccatgaaccagacagaaaacgtaactgtacgtcctaccaattggttgaaatgtggaagaaccagttctattaatcccacagctaatatgaaagctatcagattcataaccaaggcctcaaacaggaattgataaatcaactgttggcggaaagctcccactaccctgcgcactcccacttctttagcacgctccatcgaacgtgctacggtcagattgatatagttaatccaggcaataaccagaatagcgacagccgcaaaaatcagggcgatcatagcagaacgatttcctttggtttccgtctcatagcctatctgtggggtgagatgtatatctgccaagggaattaaagacacgccccacgtcttatttttcagtgcttcctctgtcttgtatttctccgccatcacaggaaattctttttctatctccgcttttctttccggtgaatcgagcaaaacatacgtataggcttcatgcttataccagtattcctgcatatattgaggcagagaggcataggaaatcagaaaattataatgaatgtgtgagttggagggcatttctttcatgactccggtcacttcgcacgatactttatcatacgttccggtaaagatcagaattttgccgatagggtcttcatctttgaaatacttacgggcaatacgttcggtgattaccacttgccggggcatggagagacaagtctttttatcccctttcagaagttcgaaatcaaaaagacggaagaagcccggatcggcataggctatctgattctcccgtaatgtcagttcgccatatttcacaatctgctccggttggagatgggtagcgatacgggtataatcttcgattccggcaagattctctttcatggccgaggcatatccgaaagagctggtcgcccagtaatcggtcaggacttccccttcatgaaaagtactttgcacccgatagatatgggcatatttcgtgtgcattttatcaaagctgaactcaaaagtgacataggttagcatcagtaatgccgatgccattccgattgccaatccaaagatattgatgaaactgaacttcttccgcttcatcagattccgataggcactattccagtaattccctatcatacggtttcgtttttagatgacgttttcttttccagcggacggttgatgttttcggctacaatctgtccgtccaatagttggatgacccggtgtgcatacttcgcatcccgctgtgagtgggtgacgataatgattgtggttccctgacggttgagttcgctcaacagttccatcacttcgatgccattcaccgaatccagatttccggtaggttcatcggccagcagtagtttacattcggtcactacggcacgggcaatggctacacgctgttgctgtccgccggataactgctggggataatgattcgcacgatgtaacaggttgactttttcgagcactttattgactcgttctttccgttggagagtcttcatacccagatagacaagtggcagttccacattctcatacacggtcagttcgtcaatcaggttgaaactctgaaagataaagcccagattacctttccgcaaagcagtcaactggttttcagtcattttatcgacttgcttcccctcaaaaaagtaagaaccggaagtcggagaatccaatgtaccgagaatattcagcaaggtggatttgccgcatcctgacggtcccattatcgctacaaattctccttgttccacctgtaaggtgacatcattcaatgcttttgtctgcacctcttctgtggtgaaaagcatagatagtttttctgttttaatcataataattattcattattttagtattagtttctcattgtctccaaataattcatacccggatatgattactttctcacccggagacaaaccgtctgtcacctcgtaatacagtggattctgccgtcctatcttcacagggcgccgcgtggcaaatgtaccactttcatcgacaacgtacatccatcggcccccggtaatttgaaagaatccgccacggggaaccagaatagcttgtgccggatcacccaattgcaggtttatgtgataagtctgtccggcacggatattctccggtcgttcggatataaaattgaggtctgtacgaaactgaccgtctttcacttcaggataaggtttagtcacttccagtttataggttcctccgtcacgggtaaagtcggcaggaagtccgggaagtacccgttctacgtagtgctcgtctatctgtgcctgtactttaaggtcggaagtgatgatttgcccgatatgttcgccggcagaaatagattgcccgatttgcgcattcaggtttcctacctgtccgtcaatcggagctttcactttcaggttttccaaacgctcacgaaccaatgccaagctccgtttcatattacgtatattctcgtcaagactgcctatctgactttcccgaaaaatatgatcctgccggatacgttcgtcaataacagccagttgctctttggctgctatatattcttcctctgcctggcgatagtcttcacgtgctatcagttgttcgtttaccaaacgtttatactgctcataacggcgttgcttcccgataagctctttattcaggccgatacgttcttgtttcagttgcagtcgttcctgctccatactaatccgggtattacgcaactcgttttcctgataagcaagatcggcttcactctgcatgataccgatattgagcaatgggttgctaagacgcagaatcacatcaccggcctttaccatagctccctcttctttcaggcgctcttccacacgaccgccctcgatggcatccatatagataatccggctaggcatgacctgaccaatcacacggatataatcactgaactcggcctgctcgacagtagcaattgtcagccggtctttctccactgccatagaagaagctgtatctctgaaaataaaataggcaatcacagcaagtccgagcattaccccaccgacccaataaagacgtttgcgattgatgccgggttttcgttcaataagtgtatccataatggtttataaaaaagttccttgtcgataatatttttctagtttcatcatcatttctatttgcaagcgtacacgaaccagttctgctttggcagcaataaaccggttacgggcttccatcagttgaaagacggaaatcaatccctcttcccatttccgttcggattctttcagtaccagtgtttcagcgtcaagttgtgataatgcctgctgatgttcactatatccggtgtgaagagaaaggagtgtttgctcaatatccgtatataattgttgtttttcaagttcttcttcgtttgtgagccgatacatattcaatttcagcttgcgctgattggtcaaacgttgcaaaccgcttagcaggggaaaggagatgccaacacccacatattttcctatattatcacgcaattgtctggccgagaaagctgtattataataattggaaccgacggtgaaacgagcaaagacagagggtgagaaagctcctcccgctatcgcatactctttatgagctgctttttgtttcaaatcaatcatacgtatggagggcaatatttcgatagattgtgcgtatagagtttccacagtcgaaacagaatatggtggtaattgggatgctgtaatcgtatccagaatagcgagtgtgtcgcccggctggatattcattaattgtttcagatgtaataaagcgatccgactgctattttcgcgcgactgataacgataaatatctccctcccggcgtgctttcacctcctgtaaatcggaagctgatttcaatcccagttccacgaagacctctgtctgtttcaaatacctttcgctcaaccggctttgttccaaagcaagatcgagcaattttctctccagaatcagtttgtaataagcatccgtcacctgataggccagttcattctgtttctctttcagctcccattcactacgttctttgttcattttccggaaacgcacctgattgatacgcgaaaagccttcaaataaggaaagtgtcatatcgagtcccaccgttccctcttcaaaagattcactggtatacccattggtgtcaggatccagcgaacgtccgaatcgtttgcctgtttccgcattaaccactatgtgcggcaggaaagcaccgacagaagctatataatccgctttcgtttcctttatgccgataactccgttacgtacagccggattctgtttataagccaaacgaatgcaatcgtccaaactcatagcggattgggctagcaggaaaaccggcactgaaagcaatagtagtaaaagaaatcttttcatcctttataatatatgattgtgtgatagcaggatgataaaagcaaatgcaatgccacaaatcataaataattgattataaaacaaatagaaattacataattcttccaccgtccaaaaattaaacgccctaacgtccaataattggacattaccgagagaatccctctattctaccccattctaactcgttctgactcattccagcataaactttgtatgaaaacgtctaattattggacactcccttgcaaagaaaatcaaaaacagatacctttacccgaaaacttaaaaggaacattcaacggacagagcccccaatcttgcgtatggaaacaggaacgattttaattgtagacgacaataagagtgtattagcctcactggagttattactcgagaatgtgttcagcacagtccgcacagctgccaatcctaatcaaatcacgaccatcttatctaccactccgattgatattgtgattctggatatgaacttttcagcaggaatcaacaatggtaacgagggactgtactggctgaaacatatccatgaaatccgcccttcactgcccgttattatgctaaccgcctacggtgatgtagaattagccgttaaagcactgaagaatggtgcaacagattttctactaaaaccatgggataaccacatactgatacagaaaataaaggaagcctatcaaaacaatcgtccaacccatcataaaaactctcccaaatcaacccagaaagcatccggtgatgaaaatctgaataagtcagaaatgttgatcggtcattcccctgcaatgctacagctaattaaggtagttactaaagtcgccaaaaccgatgccaatatcctgataaccggagaaaacggaacaggaaaagagatgttagccagggaaatacatcgcttatcttcacgaaacacccgtcagttacttagtgtcgatatgggggctatcagcgaatcgctctttgagagtgaactcttcggacacgaacgtggagcgtttactgatgcttatgaaagccgtccgggtaaattcgaagccgccaatggtggttcgctttttatggatgaaatcggaaatctccctcttgcattgcaggccaaactactgactgtactacaaaaccgaaatatcacccgaatcggaagcaacaaagtgattcccgttgatatccgactcatctccgccaccaacaaagacataccggagatgattaaagaaggtttgttccgcgaagacttattctatcgcatcaataccatccatctggaaattccccctttgagagaacggggagatgatctattattattcatcgatgcttttcttcatcgcttcgcttccaaatatcaacgaccggaaatgcgaatgcatgagcaaacgattgaaaagctacgctcctatcattggccgggcaatatccgggaactgcaacacaccatcgaaaaggcggttattttatgcgaaagcaacgtgatacgtcctaaagatattctggtgaaacagacttggaaaccacagacagtccaagcggtgcccaatctggaagaagtggaacgacaagccatcgagacggccatcttgcaaaataatggaaacctgactgctgcggccgaacaacttggtatcagccgacaaacgctctacaataaactgaaacgatttaagccctaagccgtatgctattcagccgacatatatattggaccacattaggacatatcctatttattcttgctaccgcaggaacaggtctatggctcattatttcccaacaaggagtggtaatagggatattactggttatctgctccttgtttcagattggaagattagtgaataagctaaactctttcaaccaaaaattacgccttttcttcgatgcgatagaagacaaagacaatatgctctatttccccgaaaacaatgtcagccgggaacaggaaatgctgaatcgttcactcaaccgtatcaatgccctgctcatccgaactcaagctgaatattcaaagcaggaacatttctaccgttcgctattggaagaagtccctagcggtgtgttggcatgggattcttccggaaaaataatgatggccaacagtgccgcactgactttattgggatgccagcaactagcccaatacgaccaactgaaacctatcctgcaggaaaaagagaagaaagaacgacttagtctgtctcaaaaccagatgaaattacagaacgaaactattaccatcttatccatcaaggatatcagcaatgaactgaatgataaagagagtgaatcatggaacaagctaagccacgtgcttacccacgaaatcatgaataccattgctcccatcatctccctgtcgcaaacattatccgcatatccggacaacagcgaaaaaacacttcgcggacttcatatcatccaggcacaaagtgaacgcctgctggaatttaccgaatctttccgtcgtctctcctatctgccccaaccggaaaggaaacggttttcactaacagccctcctgcaaaatctgcaagaactcctgtctaccgattttcaggaaaatcagattcatttcacacttacctgtcagccggaattcatcgacatggatggagacgagaaccagctatcccaagtcctgctcaatctccttagaaactccattcaggcgttagacggaagaacagacggagcaatcgaaatttatgcatatcgggacgagcatatatctatcgacgtcacagacaatggtcccggtatccccgatgaactgcaggaaaaaatattcattccgttcttcaccaccaaatccgaaggaaccggtatcggattaagtctctgccgacaaatcatccgtaaccacaacggtcatttgtctattttggaaagccgtcccggtaaaacaatttttcatatcgacatttcactgtaaaacaaacctttcacggtcttcgagtgtttattatcatataaacgaattttacacgatatgagcaccaaagaacaatactggaaatattccctcattgtcatcatcctgtttatgggagtcatcatcttccgccaaatcactcctttcctggggggattgctgggagcactcaccatctacattcttgtacgcggacagatgaatcatctggtagaaaaacgaaagctgaaacgaagcatcagcgcactgttgattaccgcagaaacgattttcgtctttcttatccctttgggattgactgtctggatggtggcaaacaagttacaggatatcaatctggatccacagacctatattgcacctattcaacaggtagcagaattcatcaaagagaaaacaggatacgatgtattgggaaaagatacgctgtcattcatcatgtccatacttccccgtatcggacaaattataatggaaagcatcagcagccttgccatcaacctgttcgtcatgatctttgtgctttatttcatgctgattggaggaaaaaagatggaagcttatgtcaatgacattctgccatttaatgaaaccaatacgcaggaagtcattcacgaaatcaatatgattgtccgttccaatgctatcggtattcccttactggctatcatccagggaggcgtggctatgataggctatctgcttttcggagcaccgaacatactgatgctgggattcctgacctgctttgcaaccatcattccgatggtaggtacggcattggtatggtttcctgtagccgcttatcttgccatcagcggagactggttcaacgccatcgggctttttggctatggggctatcgtcgtatcgcaatcggacaatctcatccggttcatccttcaaaagaagatggcggatacgcatccgcttatcactatttttggagtagtcatcggtctgccgatattcgggtttatgggagtcatcttcggtccgttgctgctttcattattctttctttttgtggatatgttcaagaaagaatatctcgacttgcgaaataacctcccatcgagatgacgaaactaccgaaaaattgtgtacttttgcggctgtaaaaacgacactaaaatttgatggaaacatttacattcaatactgtcgaactgattcttttatcggtggcaggtattctttttatcatccagctcatttattatttcggcctgtacaatcgaatacatgtccacaataaagctgtaggcaaagaagaggtgcatttcatacgagaactgcctccactttccgtgattctccgtgcacgcaatgaggctgaaaatcttcgtaaaattctacctgccattctggaacaggactatccacaatttgaagtgattgtcatcaatgatgcttccacagatgataccgaggatatactgggagtgatggaagaaaaatatcctcatctttatcatagttttacgcccgaaagtgcacgctatatcagtcataagaaactggctctaacgttaggcatcaaagccagcaaacatgactggctcgtatttacggaaacaaactgtatgcccgccagcaaccagtggctaaaactgatggcacgtaatttcactccgcagacccaaattgtgttgggatatagcggatacgaccgcacaaagggatggttgcacaaacgtactgcattcgatactttgttccagtctttgcgctatctgggattcgcgctagccggaaaaccttatatcggtatcggacgcaacctggcttaccggaaagaactattctttcaacagaaaggtttctccaaatacctgaatctgcaacgtggagaagatgatttattcattaatgaactagctacctccgccaacacccgtgttgaaacagacttcaacgctaccacacggatacagcccgtatatcgctacaaagattggaaagaagaaaaggttagttatatggctactgccagattctaccacggaatacagcgttacctcctgggatttgagacattctcccgtttgttattctatattgcctgtatagcaggtatcgtattcgggatacttaatttccactggctagtagcaggcatcgcattcctgatgtggttactgcgctttacagtacaagctgtcattatcaaccgcacggcaaaagaaatgggtggaggacgaaaatactatttctcgttacctgttttcgaccttatccaacctgtacagtcattgaagttcaaactctgccgtttcttccggggaaaaggagatttcatgagaagataaaccggatttcgtgagaagacagacttattgttaaatcaatcgctgcatataaatagcatccgaaccatcgtgataatagcatggctttattcctgttggaataaagccatttttcatatatagcccgatagcggaagtattggtcactttcacttcaagcgtaatctttgcagccttacattcaccggccgtctgaatcgtctggtccatcaatacctgccccagtcctcttcctctataatccggatgaacagctatcgaatagattcttaaatagcgagttcccccatgaaataacagggagacataagcgatcaccctatccgcctccatcatcacatagaaagttcctttcgaacggcttatcagataggcaaactgctctattgaaaaactgtcttcccggaaacactcccactctatttccaaaatagcgggaatgtctgcctgctgtgctttacggacgattatcggctccataatcaataatgttttgtttctagcacttgttcaaagtgattcaacaagcggtaatacatttcatcaccgataatggcatcttccagtccatgatcgatactcggattatcattgatttcaattacataagccttatcatccaccattttcagatcgactccatacaacccttttcctatcagattggcagcctttacagctgtatccaataccacacgaggcacctgataaataggaatcgtatctaccaatccacaacggcttctgcccgaatcatagtgacagtaaatttgccaatgtcctttcgccatataatatttgcaggcatagagcggtacaccgttcaatagaccgacacgccagtcaaactccgttggagtaaatgcctgtgccaacaagatagccgatttttcaaacagtatcttcagactggcttgcagttcttcttcgttcgacacctttttcataccaatggaataagagccatccggtattttcaggataaaaggagcgcccacctgttcgcttatctgttcgaacgaatgatggctggattgaaaaatcaatgtagacttgggagcagatatcttttccttctcaaaaagttctttcagatacactttgttcgtacaccggatgatagacaacggatcgtcaatgacagccattccgttttgtgcagccaactgtgacaaatggaatgtataatgattgagcgaagttgtagtacgaataaacaaggcatcaaattcgagcaaacggatagcatcatcttcggttatcatctccacatggatgttcattttcttagctacctcagtcaatttgtgcagagcacctttattgctgggaggaaatttctcctgtggatcgaccaatacagcgagactgtaacgggaagcctttgccgacttcggtgcacgccatattttcttgttaaagttatccagcgtattggcaaagaaatcctgctctgcatcattaagctgattcaggggaagaaaatgaatgccctcgatctgatttctgggatgagtattcaaagccactcttaacaatgggcaagggtaattctcgaaaataaaacgcgcaatccgttccagacctttttcccggcatttgccaaagtaaatattcaggtaccagatatcatccttgatgtcattcttctgtatccattgataacaaagggcttgcagactacggtccatccgcacccccgttccaacctccattttgttgatgatatcaacatccggaatgactttctgtcctctcgtttgggctagcagcgaacagtaatacccttcagagttatagctgtaatcattgctaagattaataactaacttccggtctttctccaccggcttgttttttagatagtcggaaacagtcaggacactacttgtctcataatacggtttccagtcatccagattatccaacaggattaacacattattcataatggttaaaaattaaacctacaagaggatattaagtaaattgggcgcaaatatagacatattattcactccacatcacgcaatagaccaaattatttttgcagtaaaaatcagataggaaaaaagaggattattcgtatctcatggagcttgccggattgatcttagtgataagaaatgaaggaccaatcaacatcaatacagatgcacacaaagtgcccaaattaatcaagataaaaagtaaaacattaaaagaaactggaacagtatctacataataagtcgccggatcaagtttaaagaatccgaattgagactgaaggatacagaatgccaagccaatggcattgccccaaaacattcctttgccaatcaaaaagactgcaaaccaaagaaaggttctgcgaatcgtgaaattattggctcccaatgcttttaaaatcccaatcatattggtacgttcgatgataataatcaataaaccggaaatcatggtgaagccagcaactcctatcatcaaaatcagaatcacccatacgttcaaatccaataaatcaagccaagcaaagatttgaggattcagttgttcgatgttacgcacataatacacacctcccaactcatcttgcctgttgtcaatatcagttgcgatctcataggttatatcttccagtctatcataatctttcacctgtaattccacaccggtcacctgttccggttgccaaccgttcaaacgattcaccagattaagatccgtcagtaaaaagaggttgtcgtattcggagaaattcgtctgataaattccggcaatcgtcaggcgacgagcgcgaatatcatcctgtatataataggtatatatcttatctcccagtttcaacttcattttagttgccaacgctttcgagataagtacttgattggtagaaactgaatcactgaaaacaggaatctccccttctaccaaatactcttttataaaatgggggtcaaactccggacctacacctttcaacaccattccttgaaaagcgtcatcggtcttaatcatacccggtttggtagagaaacgctgcacatggcttatctccggataatcagcaagagcagtcatcatactgtctcctaccacaatgggatgggtttcgtaagaactgaccgcatccaaattagttatctggatatgcgacccgaatcctataactttatttctcacttcacttttaaacccgatgactaccgccactgcaataatcattacggccaaaccaatagcaatacccgccatggcaatgaggaccgcaggacgtgacacctgctttccgccatcgctttcacgatagatacgccgggctatgaaaagtgataaagacatttgtttaagtattaggtattaagtattaagtgtagcagcaacaaacaccccagaaactacggttaatacttaatactagaatttattccgttcttcccggatacacttccaaagccttctgcaagacaaaaagtgcacgggttaaatcttcttttttcaatacgtaagcaatacgaacctcgttgattccagatcccggagtggtatagaaaccggaagccggagccatgaatacagtctgaccttcatactcaaaatcagaaagacaccatgcgcagaacttatcggagtcatctaccggaagtttggccactgtatagaaagctcccatcggaatgggcgaataaacgccgggaatacggttcaaaccgtcaatcaaacatttacgacgttctacatactcatcatacgtttcgcgtgaatattcttccggagcatccaaagaagcttctgcagcaatctgtccaatcaacggaggactcaaacgagcctgacagaacttcataacagcatcgcgtatctccttgtttttggtaatcaacgcaccaatgcggataccacattcggaatatcgtttggataccgaatcaatcagtaccacattattttcaataccttccagatggcaggcagaaatataaggagaaccggtatatatgaactcacgatatacttcatcagagaaaaggaataaatcgtacttctttaccaagtcacgaatctgattcatttcacgacgtgtatacaaataaccggtaggattgtttgggttacaaataagaatcgctttcgtacgttcattaatcagttcttcaaacttctctactttcggaagagaaaaaccttcttcaatggtcgtagcaatagtacgaatcttagccccggcagagattgcaaatgccatatagttagcgtatgcaggttccggaacgataatttcatctcccggattcaggcaggaaaggaaggaaaaaagcacggcttccgaacctcctgatgtaatgattatatcgtctgctgtaaggttgatattgaactttgcataatatcccactaatttttcgcgatagctacgataacctgcactggggctatattccagcactttacgatcaatattgcgtatcgcgtcaatcgcggcctgaggagtgggcagatcaggctgtccgatgttcaggtgaaacacatggactccgcgttgcttggcagcgtctgccaaaggagccagttttctgataggagatgcaggcatctcgtttccgcgaatggatatggttggcataattttaactacaaattactaattactatttactttttctacttggagctgcaaatgtacgcaataatttgaatacagagacataaaaactttaaaaaccttagcaaggttaaaatcgttatggtaaattgaaaagaaagctatacatttgtcatacggaaaacttaaaacaatatcataatgaccatacaccttatctcattcgcttcaatacttcacaaacaagtctcgctacgtagctcgcacgaagctattttgagcgagattgaaaaatattatactgtaaagttcgtcgaccatcaagatatggacaaacttagtagtgacgatttcaaaatcattttcgtcgctaccggtggggtggaaagactggtcatacagcatttcgaaaacctccctcgccccgccattttactggcagacggcatgcagaattctcttgctgccgcactggaaatttccacctggttacggggacgcggaatgaaaagtgaaattctgcacggtgaattaccggctatcatcttacgtatccatacactttataataatttccaggcacaacgttccttgttcggcaaacgtatcggagtcattggaagtccttcttcctggttagttgccagtaacgtagactacttgttggcaaaacgtcgttggggaatcgaatatgtagatattccattggaacggatttatgaacaatttaaacacattacggatgaccaagtcggagcatcatgcgcagctgtagcatcacaagctcttgcctgccgcgaaggaactcccgaagatttaatcaaagcgatgcgattataccgggcaatcaaaaaggtctgtcaggaagaaaatctggaagcgctgacattaagctgctttaaactgattgaacaaatcgacactaccggatgcgtggcattatctttattgaatgatgacgggataatagcaggttgtgaaggagatcttcaatctgtatttacgctattagcagttaaagcacttacgggtaaagacggatttatggcaaatccttccatgattaattcccgtacgaatgaactgatattggcacattgcaccgtaggtctcaaacaaacggagagatatattatccgcaatcactttgaaacagaaaaaggaattgccatacaagggctacttccgacgggggatgtaacgatcataaaatgtggcggtgaatgtctggatgaatattacttgtctacaggaacattgactgaaaatactaattatattaatatgtgccgtacacaagtgcgcatccgcatgaatactccggccgaatacttcttaaagaatccactgggaaatcatcatattatgcttcatggtaactatgaagatacgttgaacgagtttttccaggcaaatgcttgcaagaggatggaataaaggcatctataaaaaacgaaagatttatgataggagaaattacatgtgctataaatagagttgaagagcaaatagagcagctctttgacgaaaaagaggagtttatcatggcctatgaagatgcgctacctagaactatgtatctgaagaagttgactgaaattgattcacgaatagacgagctaaagaaaacgttgatttcgttgaatgaagagaaacaagagatcctggatatggaataacttatcctatgggaatatcttcccatttccccccatgccattctaccaccgaagtaaaacctgctttcttcaaagcggctaacccttcgaagcgggcattgtttattctttcagggtagtgcgcatcactattcacctgtacccgaatacccaattctttcaggaaagggaaataacgttcattcggatagaatgtacccagctcatgataagacttggtattgatttccaccatataaccacgtgcggcaatcaccgcgaagtaatcgcggaccaacgtgtcataccatgcttcatcaagcaaacccggacgataacaggaagcgttataatgcatcttgtcagcatggccgacaatatcaaatcctcccagctctaccatacggagcaggttcttataataaaggtggacaacagaatccaagtcaccatcgaagtgcctgtctaccaattgacggaaaagatctgccggggtatcaatatctacgattttcccttctggagaatacaacatatgcacagaacctatccggtagtcaagtggtagtttttgaaaacaaggcaaagagggattgttttcttcattcaggtagtcaatttcgagaccgatggcaagctctatcttacctgcatatttctttttcagacgagagaattcggaaaggtaatcttccattctatcccactccatcgtccatgcggtagaaaatgatagtggagcatgagaagaaatgccataagaagtaaacccttcgctgatagcaaaacgaataaaatcgtccatattggctcgtccgtcgcaatacaggcagtggctatgataattggttaggtttgtcatactaggttatattgtctgggggtatattatcattatttggttatccgggaatataataaactatacttgtgccatcgaagtggcacaaaggtgccaatatagtggcacgaatcagccttctatttcgctaagttccaaccaacgcattgtcttttcgtcaatcatatcattgacttcgggcaaacgttttgacttttcagtcaattcgtcaacggaaagtgtgccgctacaaagaagttcctcaatttgtgttttttcagcttccagttcggcgatttctttttccagttgctcgaattcacgcttttccttgaagctcatcttacgtttgtcgttcaggcggacacgggcggtcttttcttcctgcggcttctccgcttctttctctttttgttctttcgcctctttccagtcacgataatcactataatttccggggaagtcacggatatctccctgcccgttgaataccatcaggtgatctactactttatccataaagtaacggtcatgggaaacgacaatcacacagcctttgaagttttggagatattcttcgagcacattcagcgtgataatatcgaggtcattggtaggctcgtccaatactagaaagttaggattacgcatcaggatggtacaaaggtaaagacggcgacgctctcccccactcaatttatagacatagctatgctgggtttcaggagtaaacaggaaatgctgcagaaattgagaagcagtcagcttctttccattgcccaattcgatgacttcggcaatatcctgtatcacatcaatcactttcatctgttcgtcaaactgaagtccgtcctgcgaataataaccgaaacgaactgtttcgccaatatccactgttccgctatcaggcttgacttgtcccatcaatatcttgataaaagtagattttccggttccgttatttcctacaattcccatcttctcataacgagagaagatataagagaaatcatccagaatcttcagatctccgaaactcttgaaaagatggtcggcttcgaatatcttgcttccgatatacgatgctttcacttccagctttacattatcagtattaaaacgctgcttcgcaaccttttccaattcgtagaaagcatcttcccggtaacgagccttatgtccgcgtgcctgcggcatccggcgcatccagtcgagttctgtacgatacagattattggcacgctctatttccacgctcttagattcaatacgttcctgacgcttttcgagataatagctgtagttacctttatattggtagatttgttgattgtctatttcgataatctcggagcaaacacgatcaaggaagtaacggtcgtgagtcaccatcagcaggctaaggttggtacgacgcaggtaatcttccaaccattcggtcatatccaagtccagatggttggtcggctcatcaaggattaacaggtccggttcggtaatcaaagcatttgccaaagcaacacgcttcagctgtccgccggacagttgcttcactttctgatcgaaattacggattttaagttgtgaaaggatttgcttggctttctgttcatactcccaagctttctcctgatccatacgtgccaagaggttttccaatcccggatgaccttcggtttccatgcagcgttcgtactcctttatcaattccaccgtgctgttaccatgatggaaacaggcttcgagcactgtcagttcttcgggatattgcggatcctgttccaggtaatccacccgaagatcacgacgaaaaacaatattaccgctatcataaccttcctttccggcaatgatattcagtaaggtagtctttccactaccgttctttgctattaatcctacccgctgaccttcggcaatgcccaaagatacattttcaaaaagaaccaagtcaccgaaagacttggtcaggttatctatctgtaaataaggtactgccattttaatccaaacacttcttatattcttctattacattgcaaggctctcccgcctttactttactccaaacgagcttcatcgggtcgatggtccgatctttatattggagaacaggagcttcccggttgccgtcaatcaacgttttccattccatgccatccacttcatttgccagaattgcacaaacagtgataccaatagccaaccattcctctttctttttcaaaccaatcttaccgctgtcaatcacttgttgaagtttctccaagtcctcttctattccttgaaaatcctttttcagttcctgcttcacagtagataccacccattcatatccctcattaatcaaataaatttcagaaagacgtacaggaatcaattcagcaggatacttctgcccttctttacgtacctccaaagtagcgattacatcttccgcctccttcacaactccacctttaggcacggtgaaagaacattcaaaagcaatatcgtcaacgcctgtaatccacaaatgggaagtataataagttccctcctcctgaaacatttctttactatacgcacattcccacgttccgactttcaccaatgaagccgaatcgttctctttcagttcctgccggatggcatctttgccataaccggcttttcctttaaatgcggatatacgaaaattccccgtccatacatcgggattatagaaaagaaaagagccttcgccatcttcaaactcattccagtctgatggatagttcatagaaaaccatgctccgggagagataaatttcttgccttgcatccttttactttaaaatgattacttggcaaaagtacgaattaaatacgaattacaaaacatcatttccctattggctgtattttcctccgcacatctttagaaatctccagaaacatataattcaatttcccggaatgaataccttcttcgttctccttatacttcttattagcatattgcttcgatttctcgaaagtcaatagcgacatttcattctgcgacttgcctaccattgtggagtccagctgttcatccgggaaaaagtcatccagatcgacatcaccaatcattgttgtttctaggaagttcttatcagtatgtgaattatcggtataataccccacaaacatgtgtcccggcgtacgtaccagaataggatcgatatttatagcccgaagcagtgatgcaaacagtacgctaccgtccacacaattaatctgcgaagattccagtgcatcatcaaacgtacgaacccgctgcgagaaaacaacattactcgaaaggctggtgttggaaacagaactgtaacggaatttgcgtttctgcaatatattccagagagcatacacctgcttgtccaccgcccctttagccttactctgatagcctaagaagcgattgacaatacgagtattcagtgcttcgcgaagcaactggtcaatcataggattctcttcattgacataggcagcaaagaaaatacttgtatcatggaatttggttccattcgatacataccccaacagacattcattgatactgcgcacagagaatgtacgcacccgttgccccagatcttttccattcatctcgacagtaatagccacacttaccggttctgcctgcacctcatttttcagagcttcatagttccagatgatatcaggataaatcgtatattccgttcgaggcttgtttagtacaaattccgacaccgaacgggagaaaaaaggcgtttcagccacttcaatccgtacccggctataggctgtcttcgacttcacccgaacagcaatacacgatttcggattccccaaataattagaatccaacggaacaatcacctgcgcatcagtagtggcaacagacaaaatcgctgaaggaaatatatttccgcccagatcatccacaatttcaaaaccggaattgaatgaagtatatttaaacacagacataccgccaaggagaattaacagtaccaccaccgatcctattatttccttccgatgccgttttaagtcaatttttatcattatttgtagtttctataatcaaacgtttctattgtatctcgctaacaaagataacaaatagtgagcggtttttcctcttacaatcaacaaaaacttccatattcctcatcaattctcggaattcccggaatgtaacacgattgtaacgtctgtttcatctgcccgtaacaaagtctcctcatctttgcaaaggataaaataaaaacgtaactttgtcatatcacattaatacatacatcttatgaacgattaccgtattctagttgtcgacgatgaagaagacctctgtgagattctgaaattcaatcttgaaaacgaaggttatgaagttgatactgcaaactctgctgaagaagcaatgaagatggacatcagcagctatcacttgattctcctcgatgtgatgatgggagaaatctccggattcaaaatggcgaacatcctgaaaaaagacaagaaaacagctaaagtgcctattatctttatcacagcaaaagataccgaaaacgatactgtgaccggattcaacctgggagcagacgattatatttcaaaacctttctcgctgcgtgaagtcatcgcccgtgtgaaagccgtattaagacgcacagtgacaacggaaacggaaagagtccccgaacgtcttacttatcagtcgctcgttattgacatcacaaagaaaaaagtaagtatcgacgatgaagaagtgccattgaccaaaaaagaatttgagatcttgcttctgctggtacagaataaaggacgtgtattttcccgtgaagacatcctggcccgcatctggagtgacgaagtgtacgtgctcgaccgtactatcgacgtaaacatcacccgtctacgtaaaaagattggggtatacggcaaatgcattgtcacccgtctcggatatggatactgttttgaagctgaataaataattatgccgaattaaatagttattatgaacctgcctgtaactcaaaagcattttctttcttttagccgaaaacttttcctttcggttatttcactattcctggtatttgccatttgttttattgcgtaccagtatcaacgtgaacgggaatataaaatagaactgctaaacaccaaactgcaagattacaacagcaggctctacgaacaactggagaatcaacctcttgacagtgaaatcatcgacggttatatcaataaccatatcctggaagacttgcgtgtaacccttattgatgctcaaggaaatgttgtttacgacagctatccaagtcataataaccagatggagaaccacctgaaccgtccggaagtacagaaagccataaaacatggcaacggatatgatgtacgccgtacttccgagacaaccggagttccctatttctattcggccactcattataaagattatattgtccgttcggctttaccttacaatgtcagcctcatcaacaacctgcaagcagacccgcactatttatggtttaccgtaatcgtgaccttattattaatgattatcttctacaaattcaccaacaaactggggacttccatcagccagctccgtgaatttgcgatgcgcgccgaccggaacgagcctatcgaaatggctatgcaatccgccttcccgcacaacgaactgggagaaatatcacagcacatcattcaaatctacaaacgactgcacgaaaccaaagaagctctctacattgaacgtgaaaagctaatcacccaccttcaaatctcacacgaaggactaggtatatttactaaagacaaaaaagagattcttgtcaacaatcttttcacccaatacagtaacctgatttcagactccaacctggaaacaacagaagaagtctttgccatcagcgaactgcaagagatcattcattttatcaataagaatcagcaagaacgttcgagaggaaaaggtgaaaaacgaatgtctgtcaccatcaataagaatggacggacatttatcgtagaatgtatcatcttccaggatgccagcttcgagatttccatcaacgacgttacccaggaagaagaacaggttagactcaaacgccaactgacccagaatatcgcccatgagttgaaaactcccgtcagcagtatccaagggtatttggaaaccattgtcagcaatgaaaatattccacgcgagaagatcaacgtattcctcgaacgttgttatgcacaaagcaaccgtttaagtcggttattacgcgacatctccgtactcacccgcatggatgaagccgccagcatgatcgacatggaacgggtagacatcagtgtgttggtaggtaacatcatcaacgaagtatcgttggagcttgacgaaaaacatattacagtcgtcaactccttaaagaagagtatacaaatcaaaggaaattactcactactttattccatcttccgtaatctaatggacaatgccatcgcatacgccggaagtaatatccagatcaatatcaactgtttccgtgaagatgagaatttctactatttcagctttgccgacacaggtattggagtatctcccgaacatctgaatcgtctcttcgaacgtttctaccgggtagacaaaggtcgttcacggaaagtaggtggaacaggactgggactagctattgtgaagaacgccgtcatcatccacggtggcagcatctccgccaagaacaatcagggaggcgggctggaatttgtatttacattggcaaaggagaagtaaaatcaggagttatcctgcaaaacttgtctaatcaaaaaaactaacagaagagaacgcagcaaaataaaaggaagaaaaattctttgaataaagtagaaaggacattatctttgtcaccaatgtaatctacataaattcaatgtaataattgttagttatgaaaacaaacatccatattcttccagctatatgcatcctttgcctttgtgcctgcaaaagcggcaacgcttccagtctgaacaaaaatgatgtaatacaagacaccattaaaacctttacattgcctgccatccccccaatgatgacagccccggaacaacgggcagactttctggtaaaacactattgggataacgtcaacttcgccgacactaattacatccaccaccccgaagtgaccgaacaagcttgggcggattattgtgacatactgaatcacgtcccgttggaaactgcacaagaagccatgcggaaaacaatcgaacaaacgaatgtagacaaaaaagtattcacctacatcaccgacctggcggataaatatttatacgaccccaactcccccatgcgtaacgaagaattctatattcccgtattagacgccatgttagcttctcccttgttagaggaaattgagaaagtacgtcctaaagcccgccgggaattagcacagaaaaaccgtatcggaaccaaagccctgaacttcagctacacattagcttccggcgcacaaggctccctctatcaacagcaagccgactatatcctcctattcatcaacaaccccggctgtcatgcctgcacagaaacaatagatgccctgaaaaacgcacctatcatcaaccgacttttgggacaaaagaaactaacagtcctctctatctaccctgacgaagagttggacgaatggagaaaacacctgaatgaattccccaaagaatggatcaacggatatgacaagaaatttgccatcaaagaacaacaactatatgatttgaaggctatccccaccctctaccttttaaacaaagaaaagaccgtgctcctaaaagacgccaccgcacaagctatcgaagaatacttaactaatgttgaactagagtaaaacgatacaaaaatgagggtgttcggagagggctgtacaaagcgctgaaacgcccaccagtaaagggggaaaagccaatgaaaaccagtagagtagagaagagtaaagaagagtaagtaaaagtattatttctgttataaacaacagcaataatactgggcagagaagatggctttggatgctgccgttgtcggttcggaccacttcgtcggtgccgtttctgttcccgtgtccctcatgaactgttcgtccggcagataaccgacttttgtctggtaggttgttgatgctcgcccggtgggtaacggacattcacacggtaggtaacgtacgtttgtacgttaggtaaattctatattatttctcgggctaccacttcaatacttgtttgctaaagtatcatttgcttcaaaaccataccgaaatgaattagttcaaaaccgtgcagtaaggaacaaaataggtggataccgctgcatccacctataaaaaacgaccaattatgtttcaataaatctgtttcatacgtccaacgttggacatagacaaagatactttttaaaagctaatcttatgtcaaacaaataaaaaaaggcgggcaactcaatacccgcctctaaaatccgctaatttggtaaattttgtaataagtgacagtctcatttacaaaaatacagaaaatatcgaaaaaaacaagttggttctttctctttcgtatcaggacgaaagaaaaagaatatcccccaacttggaaaaaacaaataaactccctatctttgtcccgcattggtttgcgactcccttacgggggaagcaattaaaagggaatcaggtgtaaatcctgaacagtcccgctgctgtaagttccatgcatgttacaagcaattcactcattgccactggagaataatctgggaaggcgtttgtaacaggaataagtcagaagacctaccatgcaattatgtttcactgctttcgaggaaaaagcgttgagtctaatgaaccggacaagtcgtctatcatttcattcatcactctaattcagagaaagtgtgttaaaacgaataaactctgccaagtttatttatgcgtgtccggtcgaagggatttcgcccggacacttttaaatagcaacagactgaaataaggaataaatgaaagagagaacatttaagaaaatgatctttgcagtattctgctgccaattcttatccataccactttttgcacaacagcaaaaggtagatacgacacatacatattctattcctgaaataacagtatcagatatctatcagactcgcgaagtacgttctaccgctcccctgcaagtattctccaaagacgccctgaaaaacctgcacgccctgcaagtatccgacgcagtgaaacactttgccggagtgaccgtaaaagactacggaggtattggcggactaaaaacagtatccatacgaagcctgggagcacaacataccgctgttggctatgacgggatcaccctaaccgattgccaaacgggacaaatcgacatcgggcgtttctcgcttgataatgttgaccaactctctttaagcaatggtcaaagcgacaacattttccagcccgcccgcttctttgcagcagcaggtatcttgaatatccagacactcactccccgctttgagaaagaaaaaacaaccaatataagtgcatctttcaaaaccggttcatgggggctggtcaatccctccatactattagaacaacaattaaactccaaatggacggtatcagccaatggtgaatggatgtcttccgatggacattatccatatactctacactatggagatgcaaaagaagatctgacctctcgtgaaaagcgaaagaatacagacgtgcagacttttcgtgctgaagcgggactttatggcattttttctgataaagaacagtaccgacttaaagcatattattttcagtcttccagaggactacccaaagccaccactctttacaatgaccattctctacaacaattgtgggataaaaatacatttgtacaaagccaatacaaaaaagaattcagccgccaatgggtatttcaatcttctgccaaatggaactggagttatcagcgttatctggacccagacactccaaattctaaaggtaagacagaaaacagttattatcaacaagagtattacctctctgcttctgtcctctaccggatgttggacaatctttcattctctctttctacagatggaagcatcaatacaatgaatgctaatcttaatgagtttgcacaacctacacgttattcatggttgacagcttttgcggggaagtacatgaatgattggctaacaatctctgcatcagctttagcaacaattatcaacgaggatgtaaaagaagggggtagtgccggcaaccatcgtaaattaacaccgtatataagtgcttcattcaaaccattttatcacgaagaattccgtattcgcttcttttataaagacattttccgtttacctagtttcaatgatttatattatcaggaagtgggaaacactaaattaagaccggaaaacgcacgacaatacaacgtaggtctgacatatagcaaaaacgtatgtccgttcttaccttatttatctgccacaatcgatgcatattacaacaaggtgacagataaaatcatcgcctacccaactaagaatcttgccgtatggagtatgagaaatttgggtgaggttgaaatcaaaggaattgacgccacgggtagtttatctcttcagccctgggaaagaatccgtattaatctctccggtaattatacctaccaacaagctttggatataactaattctgaccccactaccgaagcagggaggacttacaaacatcagatagcttatactcctcgtgtatccggttcgggacaagccggcatcgaaacaccgtggatcaacttttcgtattcattcctcttctctgggaaacggtatgtgcagaatgaaaatatagccgagaatagtatggagggttatagcgatcatagtatttcaataagtcgcagttttcacattctaaaaactcatacttcagtcagtgtagaagtactaaacatagccaacaaaaactatgagattgtgaaaaacttccccatgccagggcgcttcgtcagagcaactttaaatataagatattaagaataaaagcaggtaaattatgaatataagaacaaaaatattatatatatatcagacactattttgcgcattcctgtcactcttcgtagcttgcgatgacttagaagacaagtcgacttcaacaaccatagatggtaatattacagaaaccggaacagccgaaatatacatattaagtgagggtttgttcaacttgaacaatagttcattagctaaatattcattcaaaagcaacaaactagtcaaaaactattttaaagacttgaataagcgtgggctaggtgatacagccaacgacattgtactctacggaagtaaactgtatattgtagtgaatgtatcaagtaccattgaagtgattgacttccaaacaggtatatcgatcaaacaaatccccatgtttacggataatggaagttccagacaaccacgccatatcgctttctatgaaaacaaagcatatgtatgttcgtttgatggaacagtagcacgtattgatacgacttcgctgcaaatagaaagtttcacaaaagccggaagaaatccggaaaacatttgtgttaagaataagaaattgtatgtctccaactctggaggattagactattcggaaggattaggggtagataatactgtctccgttatcgacatcgaatctttcaccgaaataaaaaagatagaagttggtcctaaccccggctgtatttcaccaggaccggacgaagcggtctatgtggcaacttatggaagcaatattgcagacggagattttaactttgtgaagattaatagccaaacggacgaagtagaacgcatttataacgaaaaagtgatgaactttgccatcgataataacaacatagcctatctatataattataattacaataccgaagcatcgtctatcaaagtactaaacttaagaaccggagagacgatacgggagaatttcatcacagatggaactaagattagtactccatatagcattaatgtcaacccttatagtggtaatgtgtatatcacagaagcatatagctatacgataaccggagatgtattatgtttcaatacaaacggtcaattattattcagattaaaccgtatcggtctcaatcccaacagtgtcatatttagccaaaaagcatcgactggggatagtgacggagaagaatccgacccgaatgccccctctgcttttgccaataaagtattagactacaatccggctcccagtcaatatatgaatactgttaccactgcttataaagagaattataccgctgaagaggttagaaaatatgcagaagaacaattgaaagataccgacctatgcttgattagtcttggagcatatggtggttatatcacagtaggattcgatcataccgttcctaatgtcccgggtgaatacgatcttaagatatatggtaacgcatactatgatatgttcggaacattgaccggtgctctcgggggaagcgctgaacctggtattgtattagtgtccaaagacactaatggaaatggattagcagatgatgaatggtatgaactggcaggaagtgaatataactctcctgctacgaccaaaaattatacaatcacatattatcgcccatcctctccgaaagaagatgttaagtggactgacaataaaggtaatgaaggatatgtatatcggaatgattaccatacaacaaattcttattacccagcatggataaaggaagatcaaatcacattccacggaagtcgtctgaaagataatacagtgaatgaaccgcatgaaaatatgcccgaacattgggtgggttattgttatgcctggggatatgccgataatcatccgaatggagaagaacaatgtaaattcaaaatagactgggcagtagataagaacggaaatcctgtcgtattagatggaatcgattttgtaagaatctatacggcagtcaaccaaaatagtggatggatgggagaaatctccacagagctacaggccgttgaagatttacacttcaagaaatagaaagacaataaactatatataatttattaattcaagaaaaatgaagaaaatgaaattcttaatcagccaactttatctgttggcattattcgcactgccatttgtttcaacatcatgtagtgatgacgatgacaatagcacaaaagtagaaatttccagtttaggtgtagaagatggaactactatagtaacaggacaaattattcaacttgaagctcaattaagcaacccacaaggagaagttcattactcatggtcaacagctggaaaggaagtctctacccaaagcacttatacttttcaaagtgatgtcacaggaactcacacgataacgctaactgtaacagccaacaatgaagcgcaggaaaaaagtattaatataatagtcgttaaaccaccattctatgttattaatgaaggtcaaggcaaaggttctgttaatagatacaaacaggaacaatggcaatataatatagtagaaggactaggagtaacttcaactgtaggtattatcaataacggttatatgtatatcgttagtaaacaaagtcctttccttgttaaaatgaatttggaaaataaccaaattgtgaataagatagaagacgggttggaccaaaatgcacaaggacaaaacttttgcattgttaataatgaaactggtattcttacgactagtaatggagcattcaaagttaatttaaagcaattgacattaggtgaaaagttatcaggtttagatgcagttagcagcgataatgaagatatatataaaacagacaaatacatattcattagcagcaaaaacacaattaaagtatataataccaatgatctttcctttaaacaagacatagcctaccaaataaaaacaggattcgcccaaaccaaggatggcacattatggggcgcaaatggtaacaaattaattaaaattaatgtagagacattagattatgaagaagttgaattacctaacggacttagtgttttttataatcagtggggctatactcctacaggcttatgtgcatctataacagagaatgcattatatttagtacaaatgtttgaagaaggttacagtgtatatggcaagaacatttataaatataatgtagaaacaaaaaatgctaccctattcttctctgctcccgctgctgataaatcggtatatggagcaggtgttcaagtcgatcccagaaatggagatgtatatattatctatacagaagacggatggtcgacacattatttaaatactaatatttacatagcaaatggagtcactggtactcaaaaagaagtaattgattatactggtacttattggttcccatcgactatagcctttcaataaacatagtactacattagaaatcatcctataattttaaagagtcagatattcccaatggaagtctgactcttttcatttctccacccactatattttgatttcctactatttcacaaaaaggcatccgcatcagccaaacttacaaaaggtcatcatatatttgttaatcacgcatattttagctacattcgtcgttcaaaactattaaatctacaacaatgaaattaccttttgctgaatcatggaaaatcaagatggtagaacccatccggaaaagcacacgtgaagagcgcgagcaatggattaaagaagcacattataatgtctttcaactcaaatcagaacaagtttatatcgatctcatcaccgactccggcaccggagcgatgagcgaccgccaatgggcgggaatgatgctaggtgatgaaagctatgccggagcgacctcattcttcaagttgaaagagatgattacgaaactaacaggatttgaatacatcataccaacccatcagggacgtgccgctgaaaatgttcttttctcttatttggtacatgaaggagatattgtgcccggcaactcacattttgacaccaccaaaggccacatcgagggacgtcatgccatcgcattagactgcaccatcgatgcagccaaacaaacccaactagaaatatcgtttaaaggaaatatagaccctgataaattacagaaagccctcacagaatacgctgaacggattccttttatcatcgtcaccatcaccaacaatacagccggaggacaacccgtctccatgcaaaacctgtacgaagtacgtgccatcgccgacaaatatggcaaacccgtacttttcgactctgcacgttttgccgagaatgcctacttcatcaaaatgcgcgaagaaggttaccgagacaaaacgatcaaagaaatcacacgggaaatgttctctcttgccgatggcatgacaatgagcgccaagaaagacggaatcgtcaatatgggaggatttattgccacgcgacgtgcagactggtatgaaagtgcaaaaggcttctgtgtacaatacgaaggctatctcacctacggaggcatgaacggacgggatatgaacgccctcgccatcggactggacgaaaacaccgaattcgacaacctcgaaacacgtatcaaacaagtggaatacctggcaaagaaactggatgaatacggaatcccttaccaacgcccagccggaggacacgctatcttcattgatgcgcctaaagtcctgacacatgttcctcgagaagaattcccggcacagacgctaactatagagctctacctggaagccggtatccgtggatgtgaaatcggttatatccttgccgaccgtgatccggtgacccatgaaaatcgctttaacggccttgacctacttcgtctcgcaatcccccgcagagtatataccgacaatcacatgaatgtaatagctgccgccctcaaaaatgtatacgaacgcagagaaagcatcactcatggagtacgtatcgcctgggaagctcccttaatgagacacttcacagttcaattggaaagactataaacttggagaatatttgttcgcgtaaaacaaaagtgttccccaagtgtttatattataatcgaacttaatacgtaaaaattatggcagaagattataaattaatagacaacgaagaaaagcataggtatgaatttcagatcgatggcaaaatagctgaaatagactatatcaaatcaaacaatggagaaatataccttgtacataccgaagtacccgcctcattaggcggcaagggagtaggctcacaacttgcggaaaaagcattggcagacatcgagcgacaaggtctacgcctggtaccgctttgcccgtttgtagccggatatattcacaaacatccggaatggaagcgaattgtaatgcgtggtattcatattaaataaatacatatatgggaaaaaaaattgaatatactaatggtgaactgaccattgtgtggcagcctgaattatgtcagcacgccggaatatgtgtaaagatgctacccaatgtttatcatcccaaagaaagaccctgggtgcagattgaaaatgcgacaacagaagaattaattgcacaaatcggcaaatgtccgtcaggagcattgagctatcgacttaataaaaaagagaaataacccaatagtgaaagacttcgcctgaaaggctttgaattcataaaaatgagattgcttcaaaataaaaaaatgaggcagtctcatttttcgttttagaaagacactacattcggacaatgataacacaccgagaaaagagcctcacacatttcctcatccgttcaattcaatgtccacgtcaatacaaagtcctgacaaatacgataaccgacagaataaagttcttgctgcgccttaactaactcctgaacctgaaacgtcccctcctcttgaggaataaaatgcgtcagccggagtttacgaagatcagcatccgcattttccatccgcttgaaaacagcttcctttgccgaccaatgcaataacagcccccaagttatatctccctgataagattctacttgctcatcaggacggacatagcggtcgcataccttgtgaacccgttgggcatattgttcaatgtcaatgcctaccggaaccgaagaagcaagcatcaccgccacataacctttcgtatgagaaatactgataaaaaaagaatgatctgtgagataaggtttcccctcgggagagtaaccgatttccttatcctcctgcaacatggaatacaacagaacacgaaccgacaaccattccatcttacgacgttcggagacaaagcgattcaattcctgctcacagaaagctcttcgcgcaccgggcaaaagaagcaataaagcatccaaagactcttccatcttccagacagcccactgtatgccattcgtcttatactgcagaaacgacgccatcttccatttctttccgcagaattgtaaacttaactttcaatatacggcgactatccatttcgagcacttcaaactcataattgtgatacgtcactttctcatgcagcgccgggaattcacctttaatttcgagcaacatacctgccaatgtatctgcatcacccaccaccttttcaaactcgtcttcgtccacttttgcaatcttatagaaatccgtcaactgcgttttcgcttcaaatatccaggtatggtcattcaaaacaacgtatgtacgctcttcgtcatcgtattcgtcgtgaatctcacctacaatctcttcgataatatcctccatcgttaccagcccggaagttcctccaaactcatccacaacgatagcaatatgaatcttattcgcctggaagtcacgcagcaaatcatcaatcatcttcgtctccggcacaaaataagccgggcgaatcaatgactgccaacggaaattatcccccttattgacatgaggcagaaggtctttaatatacagcacccctttaatattgtcccgtgaaccggaatagataggaatacgtgaataagcattttcaatgatacattgcatcacctccttgaaagatgtacggatatccagatcgaccatatccagacgtgatgtcatcacctccttcacggtttccccaccgaaacggataattccctccagaatattgttctcttcagaaagctctgctttatccgtcagttccaacgcgtgcgacagttcatccacagaaatattgtggctcttcttcacaaaatgcttattcagaaaagttgtcgaacgcacaagcacagtagctatcggacggaataccttttccagaaagtaaattcccggtgccgaaaaacggcaaaaagtcaatgttttctgtgccgaatagatcttaggcataatttcaccgaacaacaacaggaggaaggtcaggatgacggtcagtatcaggaactctgccaacggagaatggaaaacaaacacattcataaagaagaaattgcagagcatgataatggtcacattcacaaaattgttcgtaatcaatatcgttgccaagagacgttcggtgtccccaagaagagcagttattttatcgtcggaaggatgattgcgctcatcaatatcattccgatcagaaggagatagcgagaaaaaagctatttcggaagccgaagcaaagccggaagcaagcagaagcacacctgccagcactatggcaataatagcagagatagaaggagtgtttacggtaataccgttgaaaatgtcagccaattggcttaaataaccatctgagtccaaagagtttatattttagttaaacaaaagataatgtgccaatgagttagaaaaaatcgattggcacactatcacattatttagaacggcaaatcatctgccggattatcttgtacaggttgcgcctgcgactgctgcgtttgttgcggctggctgacaaccggttgttgctgctgtcccataacaggctgtccagaagcagaagcccccgcacccgggttggctcctttcggagacaacatttccatattatccacataaatttcggtaatatagcgcatagcacccgactggtcgctgtaagaacgcgttcttatcttcccttccagatacagtttgtcacctttgtgcacatatttatctacaatctccgccaaacggttagatgcaacgatattatgccactctgttctttcgggcacttgggtcccattttgcaatgtataggccctatcagttgtagctaaacggaaagtagccaccgctgaacctgtatcgaaatacttcacctgaggatcttgtcctacatttcccaacaatattactttatttactgacatatatgcatcaagtttatgattcttaaaattaaatctgctgccaaaattaaacagaataacaataggatgcaagaattttaagtattaaaacttaatacttgccatttagtgcttgcagcagagtttgcaccagccttgaaatagcgtactgctccagttcctccacttttattttctggaaatcaccgaaagaagtcaaattttcagataatgttacttcatacagattagcataaatcacccggtgagacaacacatgcttcacttccctgcaaacagaacgcaccaccggcacttcccccgatgcaaagaatgcacggaattccggcaaagcaagaaattcttcctccgaaagagccgtcggagtctctatcaatggcaattcgaacagattcttccaaatatcatttcctgttcgtttatttataaaggtatacgcgcccgcacgtacataaatataattgaagtaacggttggtagtctttgttttatgctgtttcaccggaagctttgtcactaaccccttcgaaagtgccgagcaaccgcctgccaagggacaaaacaaacagttgggcgactgcggagtacactgaatcgctccgaaatccattatcccctgattgtaaacagccggatgcttcttatccaacatctcatctgccaatgctgcaaaaagtttctttccttccgtcgaatcaatcggagtatctataccgaaataacgtgaaagcacccgatacacattaccatccaccaccgcataaggcataccgtaagcaaacgaacagatagctgccgccgtgtacccccccactcctttcagagccagcacttccggatatgttttcgggaaaacaccattcatgcttttggcggcagcatgaagattgcgggcacgcgaataataccccaacccctgccaatacttcatcacctcgtcctcatccgcagcagccaaagtctgtacatcgggaaaacgcttgataaagcgaagaaaataatcatacccctgcgccacccgcgtctgttgaagaataatctccgaaatccagatcagatacggatcggcagactccctccagggcagttcacgtttattctcttcataccactctacaatcgttttcgtaaactcgttcatatcctcattcctaatgtattatctaacatttatcttgtatatcctactcaaaaggcacacaaaagtaactcttttagctctaagaaaaccctatgccactatttttttagaaaaatgtgcagaatatatttttttaggagcttaaaaagctatatatttgcagtccaaaaaattagcaataacatagtaataatattttttttaaggaaaaatgactaaagcagatattgtaaacgagattacaaagaaaactgggattgataagcagacagttcttacaacagttgaggcatttatggatgcagtaaaggattcactgtctaacgatgagaacgtatacctgcgtgggtttggtagtttcgtagtaaagaaaagagcacagaaaactgctcgtaacatttctaaaaacactacgatcattattccggagcacaacattccggctttcaaaccggctaagacatttacaatttcagtaaagaaataataaacaagagtattaacccataaaatgtgaagctatgccaagcggaaaaaagaaaaaaagacataaaatgtctacgcacaagcgtaaaaaaagactaagaaagaacagacataaaagcaaaaaataatttttaagtctggatcacacagaaataaagaacaaacttgcgaagctaatgtctttcaagtttgttctttgtttaagtagctaacccaaaatgaacaatttgtcaaaaaagttgttcatataaacgagattcaatcaataataaagaaacaaaacagtgacaaatgaactagtagttgacgtacagcccaaagaggtctccatcgcccttctcgaagataagagcctggtggaacttcaaagcgaaggaagaaatatttctttctctgtgggcaatatgtatttgggacgtatcaagaaattgatgcccggactaaatgcatgctttgtagacgtcggttacgagaaagacgctttccttcattatttagacttgggtcctcaatttaactcactcgaaaagtttgtaaagcagactttaagcgacaaaaagaagctgacctccatcagcaaagcaaccctgcttcccgaccttgacaaggatggaactgtatccaacaccctcaaagtaggacaagaagtagtggtgcaaatcgttaaggaaccgatctccactaagggaccgcgactgacgtccgaaatttcgtttgccggacgctatctcgtactgatccctttcaatgataaggtttctgtttcacaaaagattaaatcgagcgaagagcgcgcccgccttaaacaactgctgatgagcatcaagcctaaaaactttggtgtcattgtccgcacggtagccgaaggcaaacgcgtagccgaactcgacggagagcttaaagttttggttaagcattgggaagatgcgatggtaaaagtacaaaaagccaccaagtacccgacgttgatttatgaagaaaccagccgcgccgtaggtttgttgcgcgacctcttcaacccatcatttgagaatattcacgtcaacgacgaggctgtgtacaatgaaattagggattacgtatcactgattgcgcccgaccgggctaatatcgtgaaactgtacaaaggccaacttcccatttacgacaatttcggtatcaccaagcagattaaatcatcgtttggtaaaacagtctcttacaagagtggtgcctatctgattattgagcacactgaggcgcttcacgtagtagacgtgaacagcggtaatcgcaccaagaatgccaacgggcaggaaggtaacgcactcgaagtaaatctgggagccgccgacgagctggcccgccaactgcgattaagagacatgggtggtatcattgtcgtggacttcatcgatatgaatgaagccgaaaaccgtcagaagctttatgaacgaatgtgtgccaatatgcagaaagacagggcacggcataatattctgccgcttagcaaattcgggctaatgcagattacacgccaacgtgtgcgtccggcaatggacgtcaacacgaccgaaacctgccctacttgcttcggcaaaggcactatcaagtcgtccattctctttacggacactttggagagtaaaattgattacctggtcaataaactgaaggttaagaaattctcgttacacgtccatccgtatgttgccgcctatatcaatcagggactcgtttctctgaaacggaagtggcaaatgaaatacggattcggtatcaagattattccaagtcaaaaactcgcatttctgcaatatgtgttctatgatacacatggagaagaaatcgatatgaaggaagaaatcgaaatcaaatagacagaaaaggcggcccggtcaaaacgagtcgcctttttgttttatctattttcttcaactatccatttttcaatattacgggtttccgcactgaagttcactcctattttaaagagtttccgttcatccatctcgaaaggaagagcataatgcttgtcatttatctgctgcaaggcttcttcggccataccattcagtttaaattccatgatataaatgaatttgtctgtctgcaagacaagatcgatgcgcccttcgcttgtatgatattccactttggcatagaagccgaccagtttaaagacaatgaaaagcacattctcgtaatgcaattcctgatcgcgaatcacttcgtaggtggtatctgcaaagaaactttgcagacgacggaagaaagaattataatccccggaacgtacttcacgaacaaatttctgaatttcaaacggagattctaccttatttacattcgcataataaggaagcaggaaacggacaaatccttcttctacttcacgattcgggaaacctaaccgatacattccaaattcttcatcataccctttaatagtgagataaccactctgataaatcaccggaatgggattagtagattcagagtctatgctattcaatacttgggcgtcggtttcttcatgcgtcatccgctccaagtcataatgatgtttttgcagcaatttcaccagataggtcggtgtgcccgtttcaaaccaatagctgccaaattctctatacttaaaagcattgagcaaactaaacggattgtacatgccgattgaattgtgtgtaaagtgatagccgtcataacattctttcaattctgcacagagtttatcatacgtcacaccgcgtacgtccgcaaattcatgaagctcggcatccaaagtatcatgaagttcctgatcgctaaccccacagatttcaacataatcttttcgcatggatatatcgtccaagttgttcaagtcactaaacacactgactttgccaaactttgtcacaccggtaaggaatgcaaacttgatgcaaccgtccattgttttaagcgctccataaaaaggctttaatgtattccgaaattgcttttgtaattcctcattaccgatggcttgcaacatgggtttatcatattcatcgacaagaataaccacacgttgccccgccaacttacaggcgcgctctataataccggcaaaacgcaaagaaaacgaacgttcggacggctcggcaccatatagtttttcccatgctgtcagcgatttatcaagtatattatccagactttcggatgtatcatatttctcgatattaaggtccagatgcagtataggatattttatccagtccttttccagtttttccacagccagcccttcaaacagttctttctttccttgaaaataggcctctaaggtggagacgagcagactctttccgaaacggcgcggacgactcaagaagtaataacttccagtctttaccatttgatacatcagtgctgtcttatcaatatagaaataaccgtcattacgaattttttcgaaattctgaatgccgatcggataaattttatggctcatattctcttcttttattaatcaatgcctttcttgcaaagatatatatttttaatagaactctttgtcatagcaggttaaaagattcttttcaatcattcattctgcacatttccccggaaacttagggacgataaaataaggggatgatgactgcacaaaattacgaaaagcccggactttcgcaagctcgggctttctgtatcttggggacatctcctttacctatagggaaatgggcgactagcaatttgattctagtacaacaaaaaagacgttccaagagtaaagataaaagggatgccagtgggaaatgtggggaggcatcccttttctaatagaagaataaagatagaaggatggactttcacaagctgtgtctcttcgctttgtcacttctcaacatataatcttcacacttcggtgaagaagggtttcatatttatggagagagcgcacttcaacaagcacgggctctcctattatgttatatcattctagagatagctcccacctctgccagaggcaaatatagaggaactatctaatagaacattaaaggatttcaaattaatccgcaaagagagcagtagggaatgttactgtcttcaccacaggtgcaggagatgttgcgctccagctgattgaaggagtaatagtaaccgtcactaccaaatcttgcacaagacccttcaaggccttaccaactgttgttaatttcagtttcttattagcatcaaactcgaagttaactttatcacttagttctaccttaatagaatatccataaagagcaagaacatcgtcagcggtagtcaaaacactagtgtcataagtttcaccatttgcagtcggccacatattcttaccttttctgtctttccatacaatgtcacccagtacatcaatctctgcatctatggtttcagctgtatacgctgttgtgataccttttttagcgtccgttgcaccaaatgttgatgtaagcagttttgataatgagataaatttcaccttttggttagcaattgaagcaggttcagcagcatcgttaggttgacaatttacatttacggtcaatgccatattgtctttagcgtgatccatgtctactgtgaatttaccgttagattcacttcctacaggatcttcaccattcttgtctatagcatacgtaatattgttgtatatacctgcattaactccttcagtaatagcgctccatgtagtaaagattgagcccatttctctttcgaggctgatgctctgaatcttatcaccattcttagtttcattaatcagaagagatacctcgtcatcttcagtccacatacctgaagtttttgtaaatacaggcatcttatagtcaacagttaccggcattttgaatataatttgcttcgttgcgtcgacgtcaactgtcaatacgacttccatagtacccttgtatgcagcggctactgtcagtttcaggttatcatatttagtatcaccagaagcaccaataccactgaacttcactttgtctccatcgttaaccgtagcagttgagctagcaagtttagcagctgtaatagcgtctttgattgccttaatattagctgctgacacaacaatgtcggatttttctgatttattccaaactaccgtctgtgctgccaaagattttgtttctatttgcttaaaggtgacagtcagtttagccggagcagaggagccaccgacgctagaataatcaatgccctcatgagcttctccatcaaaaggaataccatttgtagttatatagcagacttcaacctttgcttcttgccctttggtagaagtgatggtttgtttgccggcctcgttcgttcccaatgttacaccttcaggagcatcggctgccaacttataataatatgcatagactgtactcaaatccataggagtggtggtagctgcagctgccaagtcatccaaaacctgtacctcaccaacttttgcggacactgctgcatctaccagtttagtagcacttgtaactgcttctggtttgattttaacatcataagcagagattatttcattgttccatgcgtcttttgtacagaatgcgtatgcttcatcggcaggaagggcattctccagattcaaaccatcttttagtgtaacagtaaggtcgtaaacaccacgattcactttagcttcggtagcacgtgtcaatggttttgcagttttattttgttcgatcttagagataacaaaattagcttcattttgagaattcatcaaatagatttgatatttgctatcagtaaagtcaggacctaccggattaatcaacgcattcaacacgccggaattagttattaacaggtcatttttcttaaattcttttttctcatcacccataccaaaagtgaaatcagctttgcattgagcataacttaatttaagttcctttgttccgcctgtagtgattttaccattattaatattcactccttcaatgctactaatcaaagctgcagtaggcaaaatacttgttaattcagttccagtagttttatcttttacatgtagagtgaagctaggtaatccctcattctgtacagcataaacagtggctgacgaataatcaccttttacccatttatttgtaacgtcatcataaaaataccaataatctttttcaaattcacctgttccatcgccaataaaaggagattttccggcaggaccggcaggaccaacaggaccttcaggaccaacaggaccttcggggccaacaggaccagtagcaccggtctcacccttttcacctcgtgccggtttcccagtatcagcaccgtctataaaccagtttccattttctccaatttcaacgacagatccatctttaccattcacaatagaatatttatttccattgttgaaagtaatttcaaatccaccagtgatacttttaatgtctgttacccaattacctgcattcacttttgcttgcagttcagcaagacctgccgcattggcatcaatctgcgtttgcagattgtcgatgtcatcatcatagtctttacagcctacataagtgacagtagcaagcgtcaatgccccgaaaagcattaccctaacaaaatttttcttcataactacttaaaaattacattaataatatattattaaacactaagtttcaataatagcacgcccgttactctgtaggtaacggagaaacctttgtgcctgcttttcgggagtagtcaatactgggaaatgataagataaacaatgaaacatttttacccctgcttctgaaagacagtagaggaaaggagatcttttgcaaaaatttagaagttaacaaagccctaatacaaagaatccgcgtgttttatttgattaattcctgttttgagtagtttattagaaaaaatgtatgatttcgtttggttgttttaagaaatatgctcatatttgcaccgatattcattcccgttacctacagagtaacagagttatttccaagcacttacacctacaatagaacgttttacaaagtcaagaacttgtttatttgcttcatcaattttcttactccggaaaggtttcagataagtctccgtcacagtgatagacgaatgtcccatcgcttcggaaataatacccggatggatttcacaataataagctgtcgtagcccaggtatggcgggcggtgtacgagctcaatttatcggataatcccaataattcacctagcaacatcaactgttggttaaaactgcgcaatgccaactgatattcgcgatacgcctctttagttccttcacggcttttcaacaatggaaataaatagggagaagagggatcgcgattcatatacttcttcaccaggatcatcgcttcgggagtcaacgtcacagacaacgggcgccctgttttacgccggcgatatgttattacgttatcacgcaaatcactcttacgcaaataagcgagatcgacaaacggcataccacgaagcgaaaacatcagaatgaacaactcttgcgcctgacatacagcaaatggcacacctgacgtacgagacaatttggcaaacaccttcttcatatcttcatcacacaacgcacgtttatgatcggtacgagtaccggtataaacagaacggaacagatgaggtacataaggagctttcccaagatcgacggcacgattgtaaaccgcacgaaacgtacgcagataagtggaaacggtgttccagctacaaccacgactacgaagatgtatttcaaatccttttaaccactccggactcacttcttcaaaggtgaagtccgctttcccacaataagcaatgatggcattcagactgctacgataaacgtgtgcagtaccgaagtttccctccacctgtagccccgtggctacttgcttcataaatgttactactttcaacattttctcaatttattaatttattcgacaataaagatacaagtattctttcatctaaaaactcatcatacgaacaaaactgaaaacgaagatgtttttatagagaaagctatcaaagtcgatttataacaaaaacccggactttcgcaagctcgggttttctatatcttgtgaacgcctcctttacctatagggaaatgagggactagcaatttgattctagtacaacaaaaaagacgttccaagagtaaagataaaagggatgccagtgggaaattagggtggcatcccttttctaatagaagaacaaagatggaaggatggactttcacaagctgtgtccttcgctttgttctggggtaaaaatatctttttcacacataggtgaagaagggtttttagtctggaatactagttgactcttttgtcggatctattttcactgtaaccgttttaccagcagcataattagtaattgttccccaacgtgattcggcaacaatgttaacaataatgctaacttcagctttcaactgctttcctgtattggtaagagtcaaagcacccgtattcttatctaaagtaacatatttagcattagcggcatcagccaattcaaatgtaggagctacaaatccgaatatgcctaatggagctgctccccatttgtcgccagcttttacttccttacctgcttcccacattttctctttattagaagctttccatatagctcctgttgcaagttgagtagttgcatccactttatcactaccaatcttcactgttgtagcagtcggagcagtccattcaccactaagatcagcaagagtaaaggttgtttccttagaagttactaattcgatatctgctccagccgcatttttagcaataaccttagcaacaactactatagccttagcaggagcagggttagagtatgtattatccactttcaagacattatctgcaaggctaacaccagtgatcgcctctttcagtgagaactgaacagtagcacctaccttcttagcattgtccacaatcgttgcatagttcgcaaagagagaagggatttccatcatgaaattcatagatgtaggcttgtctgccggaagaagatttgcggtcaaagccaaacttgatccaccagtaataatcttatcatcatacgtcaatgtgtaatcagcatctgttacctcaactgtaattgatggtttcaaagtgaagttctgtacatcagatacctttacttttacttccggtacataagtatcttttactgtacccttcggaactacaatttccaattcgtttgtagtggtattagctttaaatctcaaatatactccttctgcagctttaaaggcaaaattctctgctggcaatttttcataaacttcctgactaataccaatatcagtactaccaccagttgtaccataaggaactgtcacatcagctacttgttcttttgttccatcaaatttaactgccgaaatagttggagaaacttccggatctgtcgatgccgctttagcggtaacatcagcaaaagcagtaactttctcgaaatcagtaccagtgattgttacagtggcctttggtttggctattttaccattagaagcatcagtataatttttcaacttcagtacacccttctcaatggtataggaagccgcatcatcgccctctaccttatatgatactacgaacttctcggcattcacactgcttgccattggctcattagtaacatcatcaccagctctatttttaccagtaatctgaagaacagctcccgttgcataatctacaactgatagaggtttatcataaagaatataatcaatttctttattcggtgattccacttttacatcagtaatcgctctataatccgaaattaccgggaaatagttcgaactgatattagtcagattcttgctttgatctttagcgataagattcagactaacagcgaaactcttgtccgttgaagtagaaatagtaaaagtaacgatacctgtagcttcgtctacttccgttttctcaatgttataaatctcggctgtgcgggtcttaatttcctgtccgtcgaacgaaggagcataattctctgcgaagttggcaacggccgttgcaggagaaatacggaatttcatctggatcggtttcgtttcagctaccaatttattatcgtagaaataagacataaagatgattttaccatcttcatattcaggaacataaactacgctctgaatctgattttcaagtgctgtgatacgagtttttaatgcagtaaactctccatctaccccacttttataagtagcaagataggcttctactttattatcaaaatctgctttagtagcgcaatagccataactagctttgatcgtagagatttcagccaatactgccgcaaaattttcataaccaccaccagctaaagctgtttcgatagttgttttaaatgtagtaagcgtagtgatattactggtaacagtttggtaagcagttgcctgttcactcttataagtttcaaaactagtactcaacgttgctaatttatcgtctacacctttgatagcaagattgatagcagaggtttccgccaatacctgtgattcaataacctcgtttacatatttagcaatagagccattgtctttcagcaactccagaacttcgttatcaaccaatcctgcaagttcagaatgggctacgtaagcagtcaaatcatccttcgatgcagcgttttgattgaatgtttccaatgcggtgattctgccatccaatttttgcagttccaagatattagcttgtatctcaacaatagcagccgcattattgtcagccatatcttttacagccttcaattcattcttagcttctgccagttcatttgctaattttttcaggtcttcgctagatgcagcaccagccaatttttctgtcaggtcggcaactttagcttccagatcttttttcgtttcgttcaaagttccctcgattgagtttacttgttttgaaagttcggtaatctggtcgcccaatgttttaatagtacttgcatctgctttgttttccaacgcagtctgcaacgcttctactgttttcagcaaatcctgtactgccttgctatccgccttaccatcaatagcagtttgcaattgagtctgcaaagtttgaatggcactagatatggccgctttcatgtcctctgtactcaccggattagtggacgtaactttatcaatctgctcttgcagatttttgatgtcatcgtcatagtccttacaactcgttacagttgtactaaccgcaagcgtcaatgccccaaaaagcattaccctaacaaattttttcttcataactacttaaaaattacattaataatatattattaaacactaagtttcaataatagccgcccgttacttcgtgggtaacggataaacctttgtacctgctcttttggagtagtcaatactgaaaaataagacgataagcaatgaaacatttttacccctgcttctgaaaggcagtagagggagggaaatcttttgcaaaatttagaagttaacaaagtcctaatacaaagaatccgtgtgttttatttgtttaattcctcttttgagtagtttattagaaaaaatgtatgatttcgtttggttgttttaagaaatatgctcatatttgcaccgatatttcaacccgttacccacgaagtaacagagtaaaaatcaagcacttgcacccatcaccgagcgttttacaaagtcgagcacctgtttatttgcttcatcaattttcttacttcgaaaaggtttcaaataagtttccgttacagtgatagacgaatgtcccattgcttcggaaataatgcccggatgaatttcgcaataatacgcagtcgtcgcccaagtatgacgtgcggtatatgagctcaaccggtctttgagtccaagcagctttcccaccagttccaactgatagttaaaattgcgcagagccagttgatattccctatacgccattggcgaaccttcgtcactgtgaagaatcgggaataaatagggcgactgctcctcgcgactcatatacttccgtaaaagaaacatcgcttccgacgtcaacgtcacagacagtggacgccccgttttacgacgacgatagctaatcacattcccccggagatcactcttacgcagataagccagatcgacaaaaggcagcccccggagcaggaacatcaggatgaacaattcctgcgcacccctcatggcaggagtaaccgcatccgactgcaacagacgggcaaataccttcttcatatcctccgcatccaatgcccgacgacggtccgcccgcgtacctgtatatacggagcgaaacaaatgcggcacataaggcgctttccgaagatcgacagcacgattgtaaaccgcacgcaacgtgcgaagatacgtagacaccgtgttccagctacacccacgagcacgaaggctaccctcaaaatgcttcaaccactccggagttatttccgggaacgacaaacaaccggaaccctgaaaagtaagaatcgcattcaaactacttctatatacatgagcagtccctaaattcccactctgctgcaaatcaacagccacttgtttcataaacgaagtaaaactttcctttttcattaaaaaataatttaataattaatatttactaatttcacaatttactttagtaaaatacgaaaatatatatacaaagatttacatatataaaattataatattaaaaactgaaatattcacattatctatcaaatttatttttatacatttgcgcagtttttttaaacaaataatcattttaattactaaaaaacaacaaagttatgaacaacaatgaaccagctgccgaacactacagcatcaatggattcaagtatttctccgagttggcgaaagaatattttccagatctggcaaacgcctcttccgccagcaaaaaaatgcgcaaacgcatcaaagcagacaagacgttgaacgaacaactggctgccgcgtattacacctgccaaacaatcgacatcagtcccgaaatgcaactaatcctttaccgccattggggacctccccacatcgacctgccgaccaacgtttaattacgtagtagaaaacgaaaacatcgacaaggaataaaaagaaaatcgaactatatatttttaaatatatcatttatctttttattgtttattatgtattccactttgcgttcaccacttttttcggaaaagaagataactatcatttatacagctatttacagaaagaaaaaagcgttccacaaagcgttcggcaaaatgaccgtttttttcattccaaacagagcctccgaatcctcccaacgaaggctctgtttatctccggcagaagttctatcaaacacaaacagagcatccgtttcatctcctgatcgcttcttcgccccatgaaagaaaacaaaaatacaacaacttacgtaccacaactattcttcttcgtccacacccgtccacaaacagacacaccccttgcaaaccgcacgggaatagcgtacttttacagaaaatttaaataacactcaatgaaaaatttcaattttcaagccatgctgaaacatggttttctcattatccctaaagccttactacagcagcagatagaagaccgacacatgcaagaaggagaaatagaagctctcctgaaaattctgatgaaggtcaattattcggatacactctacaacgaccgtcaaaataaaaactgcctgtgtaaaagaggcgaaagcctgtttagttatcgcgactggagccacatcttccactggtctgtcggaaaagccttcaggttcatacacgagcttgccacgctgggaattatagaaatcatctctcaccccaacaattcctccctgcatattcgtgtcgtcgaatacgataaatggatgggagttcccgatagcgacaagcagaaaaagaaagccgtcaacgaaaagtttcacctgttctggaatgaattccacagcatcacacagctccccaaagagaatatcgccaaagcacaacgcgaatggaaaaagttgggcgacaaggaacagcaactcgccatcgacaggatagaggaatattatttccaccaaacgaacatcaatttccttctccatgccgccagctatttatccaacaaagcttttcttaacgaatactgataatatgaataccgaaaacagagtttcgccacaggctcccgaaatagaagaagctatcatcggcgcctgcctgatagaacagggagccataccactggtagccgacaagctgcgtcccgaaatgttctacgtcctgcgccatcaggttatctatgccgccatactggccatgtatcatgcaggaataaagatagacatcctcaccgtaaaagaagagctttcccaccgtggaaagctcgaagaggcgggcggaccgttcggcatcacccaattgagcagcaaggtggcaacctccgcccatcttgaatatcatgcgcagatcgtacacgagaaatacctgcgacgcgaaatgattctggggttcaacaaactcctcgcctgttcgctagacgaaacgatggatattgacgactcactggtagacgcgcataacctgctcgaccgtctggaaggcgaattcggccataacaaccacatgcgcgacatggatgaactaatgaccgccaccatggtagaagccgaaggacgtatcgccaacaacaaaaacggagtaaccggcctccctaccggactggcggatctggaccgcatgacgtccggactacagaaaggcgagttggtggtggtcgccgcccgtcccggcgtaggaaaaacggcattcgcactacacatggcacgaagcgcagcaatggcagggtatgccgtagctgtctacagcctcgagatgcaaggggaacgactagcagaccgatggctgacagcggtcagcgaaatcagcgcccgccattggcgatcgggaaccgtcagccaacaggaactcgtagaggcacgcacaacagccgctgacctcaaacgcctgccgatacacgtagacgacagcacatcggtcaacatggaacatatacgttccagcgcgcgactgctgcaaagccaacatgcgtgcgatgctattattatcgactacctgcaactctgcgacatgacgaccggtcaaaacaaccgcaaccgcgaacaggaagtggcacaagccacccgcaaggcaaaattgctagccaaagaactgaatgtaccagtcgtactgcttagccagctaaaccgcgaatcggaaaaccgccctgccggccgtcccgaactggctcatctccgcgagagcggagctattgaacaggatgcagacgtcgtcatgctgctctaccgtcccgcccttgcaagggtgacgaccgaccgggaaagtggttatcccaccgaaggtctgggagtagtcatcatagccaagcaacgcaacggagagacaggaaacgtctatttcagacataatccggaaatgaccaagatcaccgaatatgtccctccgttagagtatatgctgaaacatgccaaataagaaacagttacactaataatatacaattttatattacaacatatagcataaatcattttctcattttatttcattatacatacaatatatatagcaaaacacttgactttccctctcatatttcgtatatttgtaatgtcgtaaggacagagaaaattttattacttaaaccttaactttttattgtatgaatgtattagtggagcgctatcagcgcagaaagtatgtgaatcaaccggattcacagatgttgtattatgtacgccagaaatcgggcacagtgagagtgatggacatcaacaagctggcggatgccatcgaagcgaactcctcgctcactgcaggagacgtgaagcatgccattgaggcttttgtcgagcagttacgcctatcgcttacccagggcgacaaggtgaaggttgacggattgggtacgtttcatatcacattgagcagcgagggggcagaaaaagagaaagattgcacggtgcgcagcatccgcaaagtaaatgtccgtttcgtggcggacaaggcgcttcaattggtaaatacgagccatgccactacccgaggcgaaaataatgtcgattttatcctgacagcaaagggcgacggagaaggtgacgatgacggaaatagcggtagcggtggaaacagcggcggaagcggagaagctccggacccggcagcttaatctttaaaacagcgccgcatggatattacggagtgatttctacagttactctctatgcggtttctgttttcttctacatttattttttaattctcaattttcaatcctcaatttattaaaatgcttgataaaatcatagagatcattataacgatcctgccctttctgggcagtaaccgcaaaaagcgcaaagtaatggcgcaagaagtaaaagagttcagcgaactggtgaaagaccaatatacttttctgatgcagcagttggaaaaagtgttgaaggattatttcgaccttagctcgaaagtgaaagagatgcatacggagatattctcattaagaggtcagctggcgcaggctgccaccttgcaatgcatccataaagagtgctcgcaacgtagcatggcggaagcctgacaatgaacggtcttatccatgagaactatcaatctaatagtaatccattgctccgccacgcgcgaggacaagagcttcacggaatatgatctggatatctgccaccgcaggcgcggattcaacggaacggggtatcatttttatatccgcaagaacggtgatataaagtctacccgtccgatagaaaaggtcggtgcgcattgtcgcagtttcaacaaggaaagtataggtatctgctacgaaggaggactcgactgcatgggacaaccgaaggacacacgcacctgttggcaaaaacactctctgcgtgtattaattctcactttattgaaagagtatcccgattgccggatatgtggacaccgggatcttagccccgacctgaacggaaacggcgagattgaaccggaagaatggatcaaagcctgtccttgctttaatgctgaaaaggattgggataaagtctaaaaaaattagctttattataatttaggcacggataacacggatttcacggttgctttgtacaagcatagcactaaccgtgcaatctgtgtaatccgtgcctaatctttaacttatgattttgctagactacgcgttatcaaaggccgtttagaaccgacgtaatatgctgtctaattttccaacgaggtaaaaaggtagatttatcaatttgaattcttttccgtctgccgtctttacctcatccacagcataaggctgcgaccatattctgactgcaacagtctgattagagtgattcataaaagaatgtaaggaacgcaagtgggcgttatgccctgatttgacttcaatgggataaaccatagaatcctgcacccacacataatcgacttctgcattagaaccacttttattacgcacccagaaacaacgtttctgactgactttatctgtcagtgtcaacagttcttgcgctacaatctgctccgctatcataccacgccaagcatccattatatcttttgctcccaaaacctctttctgtacctgtgccgcataattcaccaatcctgtatctaaccagaccagtttgggcatacgctttatttcaggagtggccggaacttccgttgccgtagtcggataaactaattccagcaacaaagttataaagaatttccaaagatggggcaaaataccattgattttgtttcaaagatggggcaaaagtctatcgtttatgttccaaaaatggggcaaatccgcctaatactgtcgtaaagatggggcaaaaagaacgtatttacaatcagctaatctacaaattagacgacttaccatgtactaactccaatcgtacatcgtaaatcgtctaatcgtaaatgaacttaatcgtaaattatttttctacttcacgtcgaatgcagcatcaatcaacgctttcaagttcagataatgacttctgtatattccactggaagcatttgccgcattggtcaggtctcttctaagatcagtcaactgtccgcgtgcaatagtcggtgcttcagaagggaaatcgaaagctacgagcgaataaccacccagacttccgagcgaaccggaactgttcttcggtttatcaagcattccaatcaacgcattgacataagtcttttgcaaactacgttgggaagcatccggtttctttcctccttgcatatcgctccagatactcttcttcaaatcacggaacaaatcgttggctgtgtatgccttcgctccgttgaccagttcgttgtccgtcatcttatcaagtgtgcggctgctaagcagttgtttcaatgtactgctctgtacacggtagatcgaattgaaagtattgataccagttctttcggacagtttatcatccatcagccaggtcggtgtggtaaacagttccttgttcaggaagtcgaccgctttcttctgaatatccttcggaacatattccaccgctttcatgtctgtctgttccacagaaatcggattgtggtagataccggccacattggtagccacatggcccatgtacaagtcgaattgtcccaccacattctgatacaaacggacagctttcatataaccctcattcggttcataagtccagttcatgatttcaggcatcacacgtttcaggtttttgattccatacgagcttgccagcatggcatcatctcccaaatcttcactctggttgcggggatcgtttctgtcgagttccgttccgaacgtatagcgtttgtcctcccgcagcttctcaatgatccacttattcaaatgaggtatttcggcttccgccgtttcatattcaggcatccaacgatagccccattcaatcgcccatttatcatacataccgatacgggggaatattcccgaacgtgaaacgttgtcttccggctgtgccacatagttgaagcgtgcatagtccatgatagacggtgtatgaccgttggcttccacccatattttgtctctaagtttctctaccgggacggtattggaagaaccgaagttatgacgcagtcctaatgtatgtcccacctcgtgggaagatacaaaacgtaccagttcgcccatcagttcatcgtcgaacatcggtttgcgtgctcccggatcaatggctcctgcctgcacgatgtaccagttgtaaagcaggctcatcacattgtgataccagttgatatgcgtttcaagaatttcaccgctgcgagggtcgtgcacgtgaggtccgcttgcgttcggaatatcggaaggcttgtacacgatagccgaatggcgggcgtcttccaagctccaggtaggatcgtccgtcggtgcttctttgccgaagattgcatttttgaatcctgctttctcaaaagcggcttgccagtcgttcactccctgaataaggtacggaacccatttcttcggagtgacagggtcgatataaatgataatcggtttctttggttccaccaattcgccacgcaggtatttctcgcggtcttcgtctttgggttcgagacgccagcgggtgatattcgctttatacttcactccttgcggattctcgtcaaaatccttatagctcacagcaaagtaacctacccggtcgtcgtgcaatctcggtttcatcggttccttgggaagtaatagcatagagctgttcagttcgtaagtcaacggagtggtagaggtggcaaagaaagctgccagcagtttctcaagtccactgcctcctcctttcttccgctggaaggtacgcacggtacgtatttcgatgttttgcggaaaggctttcagtgtgtcgatataactggcgtcgtctaccatgctgctcgctccgatgttgtctttcacccggctggtgaatgaaaacatttcgttgtccttacggatatagtcggtcatgtcgatcacatagttggtagtttctccttctttacggacagttttcagcgggaaggtggccacaatgggttgaacattggagttcaatacggcctgatacatacccagtgtatcagcagaatgttcgagataagagatttcacgcacgaacagtttgtcgccgcgtcctttctcgaaacggatcacttcgtcgctgatgtaatctcccggatagcctactttacgtttctgcgcgtctaccggtgctttcacaactctgttcacaatcaaaatatcacgtccgaaaagagagtcggctatttcgaagaaatatttaccatctacgtaatgcactttaaaaaagccgtccattgttttggctttgccggtgattacttttgcgtaaggttgcagagcatctttcttactcttggcaatggagtcagccttggctttatccaccgcttccgtcttgctcttctttttcttctttttcttgaagatgtccgtcgattgtgctccggccaatggaacgatcattgccagaatcatcagaattgaaactaatttcttcatgctttcttttttaatatttatatacagatacaaagataataattattcgataccggcaatgccatacatatttaagttgttgatactagacatcttttcattcggtttgcctgaaatagtatattcctgtccatcaattgtcaaagtaaaattataggtataagttagccctgtttcaaaaggtacggcaatcatcatataacaggtctccaaactggcaccaaaatacccggcagttatctcgaagccgccattaggaagattataagtaatactgtttatcggagtaccggaaattttacctgtcgacaaatctacagttgctccatcttcgtaggcaatcggatggtcacagctcaccaccactttagtaaatttcttaccgacaaaagaatccgggcatcccgcacccggtaaagtgatttgagaaaacaatggtttgaattctcccaaagaaacagttgcagcagaatagctagatgtagtagccgaagcataagcaaagctataattacgatgcggcataaactctgattcataatactcctgcacagctaagttgggcaaagcgacagccttataatcttgtgaagctgcgttatagggcgtataggcataaatagtgtgatcgccacccttaaatcctgcagcaagttcggaagaaggattcagcgtaatatcttcagtcacacgactatcacgatcatatactatatacgttttaccatccaattctgtagtagtagccaccgctacttccgacggagcatacggcaagttatcctgcggtttgccatcggacaacacatatattcctatcttgtccgcttcaatccatccctggcttccatgggaatacacattataagcaccggaaacagcaattttccccactacgggaatatctgcatcttcttcttcaccatcgtcactgctgcaacttactgaagacaatactaaagctacacaagcagcaaaataaaacagtctatttttcatacttttctcgtttaaatgattaattatttactgataggttattttctttttccaattaatattctccttcatagttcgtgcaccataccatgcctttcacatcgccaaacccgctaaaagtcttcaattccaaatcgggagcaaaaccttcgaagagacgtaccatctggctcgtgtttacatcgatgatggcgatatccccattttcctgcgaaagtgccagccggaaattcggatcagtgctatttcccccatagccataaaactcacaaacaacaggacttccactgatgccggtgatacggctgcctgctgtgtaagccagcatatggctgcgcatctgcatactgtatatatagagattcttatctccatcggtaaagtagaaataagggttcttttcaaaattggaggacatcttaatgacactttgcggagtcaataaggagctgccgctgaatccgtattgatccgtaccggttatcaggtgagagttattatccatgtcttttacggcaaactcgtgcaaatcataatttccggttccctgcacgtcaatcagcgacacgtagtttgaccaaaatgtcagcccgccgttggaggctacatctttcttttcgtaagcccctattgccaggcagcgggttcccgctcccatattgttcacccgcaacacaccggagggaacttccaaatcctgatcgtatgttttgaagtagacgatggcaggagtataaactgctccccactgcggataatgtgtaatgccgataaaacgggcattttgctcatcatacaagatacaacgttcttcgtcggcacaccaataagtgacgttgtggaacggtgcgaaacaggtgatacggctacctccctcaaactcatacggcatggcgccgtacttcccgtaataaggaatcgctttattgtcagtgcctacggcacggatatacacttccccctgttcggagcaaatcacgtaatattcttccttgaatgcgaagtccattatcttcaagccttccggctctttacggttttcaaattcgtgggcaagccacatgtctttttgcaacgaattgccatctagcgtgacacttccactaccctgatttatcaggattttcggcaaacctgacacgtaggaaccggagatagagcctaatacataatagtaatagatcccgagcgggtctgtacccagaccatcttcgatgatgttttctacatcgtgcgtagcccggaggccgggattgatgaaagataaagaagattttccgtctcctttgttggagagaatcatccagccccagtcgaaactgttctttcccgtcaaggtatatttattgctgatgtatgtttcattcgtttccttattgatgactttcagtatcagttcgtacgttccgcctttttcgaactgatacttcagatgataacctgtgtagatcagttcacggttcagataccattgaacggtgaaaagttcatcaacattcccgatgtccgttgagaagttgatgggcgcatccatctcgaaaaggttgcctaccataaacgtgtagtccgatgaagcggagttcacaaaagaaactttggtagagtttgtatagtcatagtttcccaaatcgtcataacagccggttatcacgagaagctgcaggattgaaatgaatagtattgtttttcgcttcataatttattatcagttatcgagaatggtttcatacagcggtgtcactccgtctgtatcataatattggtaattgccttgctgccactggtctttccaccaggccttgaagtcggctatcaggttgacaaactcaataccggtgtatttatccaatgattcgagtatctcaccatccatgaaaatgataaaaacacggtatttcatatccgaataagtacccagattggctgccgaactctggttccaccaaacaggttgggaaatccggtcggtcacttgaatcgtgacgtgtttgtattctgccggacccaccagacagttttccactgcatccagtgaaagggtaagggtgtagtctgtgttgagcaggtcttcattgcgatagacggtgacttcgtaggtgtcttccgccagtccgctatggaagatgccggaggtcaaaggggcatagtcgatgccggaacgggcggtgcttttctctcccactgcggaaatatcacaggtggcattttcttcgagcaggtagccaagaagtgtcattttcactttcacggttccttctcgaagcaagggtgcatctgtagcaaagttgaatgttattttctgtggagacttatcgctcatgtaagtaaaatagacgtaattgtctccattataaacgtccagctgctcttcactgcaagaggtgagaacgaacagcaggcagaagatggtatatgtcaatattcgtttcatcttatccgggcattagttggttgtttcactggtaggcaatggaagtacataagaacctgtcatgttgatttctccttcctcgtcggaatcgggcacggtggagaggttcatccgtttgtaggtgtagaaggttccaccttcgcctatcatttctttccgtatatcgagcagtatttcggcatccagttgttcacgggtgctgactgtcagactaagggtacgttcagctccacgggcttttcgaactgtttcgaggtagttgattccttcggttatcttgccattatagctactgatctccgccaggatatgacagatttcactgaaccggatcactggtatcatcggattctccattgcttctactactgattctacggaagggttatacttcagtgtgtaatacttcgactgggtttcattggtagtcccgatcaggtaggtgagccgatagtcggtatatacgcccgtattgtccgaagcaaacagggaagggatatttgccaacggcaaacgggtggttgacgaagaagaggaagagccccatacggcctgttcataatccgtagccagctgtttcttgtacaagccgaacaatatgtcgtgggagacttttgtatatcgggaattgagattgcaggtaatgttctctccttctgtaaagcctatccaccgtttctgctgataataggtgttgtaaagttctttggcggctgtctcggcattcttgtaataggcaggaccggcatagatgcagacacgggctttcaaccccagcaatgccagatagttgaagcggatgccacgataccagaagaatgctcccatatcgtctatataggaaccggagttgaagcggtagcgggcattccattcgggagtaggttcgtacatttgtgaagcgtacatcgcttcgggatggtattcggtgtcaaacttacgcagaatgtcttccgcttcgagcaggtctttcaggactttctcgataaaatcggtaacggtacatttttctaccactgcggcttcgtatttatcgcggtaaggaagataggcgcccgaaggattggttgccgttgcaggagcaaacaagcgaagcaggtcaaaatgcatcatggctcttaatgacaaggcttcggcgtaaatgaggtttttctcttcttctccgtattcgaacaaagagatgtccgtgggccggatgttctcgatgagcttgttcaggttggctatcactttatagcctttttcccagatagctgtcacgacgggttcggtgtcgaccgtgttatagataagttcggaagcgtcggcatacatcggagagatggttcccgccttttgattgtattgctgggagatggcactaaggaatccccagcttagttgcttaccgtaaagttcgtcggacgccagattggtgtagataccattcagggcattccggtagccgaaaccggtggaaaacagatcgtcgtcggctatcgcattttctggtgttacgtccagccaggcattgcaggaaacggctaacattcctgtcagggctattagtatatggctgattagtttcttcatttgtatggttagaatatgatgttagtagtcagattgaatgaacgcgaataaggataatccagtccccgttcctgacggatggtagaccaatagaacaggtcgttcatcgtgaacgaaagacgcaggccggatagatggagtttctttaattgttcgggacggaaattgtagctcattgtcaatgaactccattgcagggtattgtttttctgtacaaaacgcgaagatgcgccggtggtgacattacggtcacgaatatctttcatggtggttatgtctcccggtttctgccaacggtcgagcaatacccgcttatctacattgtcatttttaatgtcggcattctctacataggagacgagggtattgttgtaagcatctccaccaaaagtatagaggaaagaagcaaacatggataactgtttataggacagggtataaccgaatgagccttgtcccttgggagctgtatcgccaataatggtccattcgtcggcagaccatacatcggtaacgtcaccattccggcgaaggtagatttctttgccgtttgtggggctgattcccaatgacttcatcccgtaaatagaggtcagagaggctccttcgtaatatttcaggtatgttttagcatattttgaatcggagctgctttcggggttatatccgctgaacagttcttccactcttttattatagtcgcgcattgcctgggagatttcaataatcgtgtttttgtttcttgcaaagctgccgtagagctggaagagccagtttctgtcactgtaaagtcgtgcccgcagttccagttcgacgccggtgtttttcacctttcccatgttttctttgtaggaggtgaatccggtagaggaagggatggtataatcggttatcaggtcgatggtacgctcgtcgtaggcagaggctttcagatagattttatcgtgccacagtccgatttcaactccatagtcgagggtgtatttacgttcccatttcaggttcggatttcccatctgatagaggaatacaccgtagcctgtgggataccagctgtctgtttgcagctgatacatatctttggccgaatagagggagaagttggtctttccggtcagtccgtaggaggcacggaacttcaacatggagaagagttcgttcgacttcataaaatcataattatgaatgttgattcctgctcctgttgaccagaacatggaccatcttttatcggaaccaaattcggaagaaccgtcgatacgtcctgtaaggtcggcgagatagatattgttataggtgtagttggaagtaagcaaggctcctaccaagcgggtggtattgtcggagctgctgggctttccgtatacttctgccgcatagtttgaagagacaaggtcgccaccagggaatccccggtaacgtgtttcggaagcagtgctctgcgtttgtctcatgttggaggacaagcagatattgagattgtgtcccttgaaggtattgttgtacatgagtgacaggcttccgtctatcactgttctcttttgtgtggattctgttttttcaccattgatgttgcctgtactggctgaataactggccgatgcgggatctttgtacagatcaccggtagaatttctcatcaggacggagaactgaccgcgcagacgcagaccgtcggtgatacgccaattcagactaagatcatcggttacttcatcataaccggaatggtcgaagctgttgtagaagttgatttcgtacagtggatttacttgtgtgccgctagccccgtcgaacttttcgagacggcgcacataatcgccattttcatcatacagacgcatataaggaagtaaatgggagtaatcgctgaatgaattgaaggggacatctgtgcttttgttataagtgtaggtcactttgttctttatttgtagtccgccaatgcggtagtctacataaaaagcggcattggcattcttacgggaagagtgtttcatcactccttccgttcctctgaatcccagttccactccccagcgcacgtcgttttctccaccgtctatgaaaacggagtgtttatggttcagagccgtgcgcagtccttgagaaagccaataggtatcgacacctgtcagtacattattgagtcgttggtagtaaccgttggtataggggtctatttccggggtgttgctgtcatatagtcctgccaggcgttcggtttccagcttctcacgggcgttcatcagattgtaggaggataaatccggcagttcggcagaaagtactccggaatactgtacacggaactttccggcttcgggcgcacgccgttcaatgacaattactccgttggccgcacgtgaaccgtacatggcagtggcggcagcatctttcaggatattgatgctgtggatgctattcatatcgaggtcgtatatcttttctacatcgacttcaaagccgtccagtatgaagataggcaggttggaattaccgcttagcacttcccgcgaaatggaggaggtggaggtctgcccaagtgtcgtttctccgataccggtctgaccacgcaagacgaattgaggcaggctgttgggatcggaaccagcagccagattctcctgtattctgaaagagggatcgaaagtctgaatggccgaaatcaggttgttcgggttgacttttaacaggtcttctttctctatctttgtggtatttcctgtgaaactttctttctgtatggagttatagccggttacaatcacttcctgaatactttcggtagcttctaccatctgcacatcgactttctgccgggaagtgactttgattttacgggtttcaaaaccgatgtaagaatagataaccagaccgcctttttcgggcagggtcaatacatagcaaccgtttatatcggtaattacaccagtagaatgaccatccaaacgaatcgtcactcctaccatcggttctttagagagtttctcaatcacccggccataaacataatttccgtgtggaggaagaagatatgtctcttttgaattatttttgttttgggctattgcattagtagatagtgataaaatgtatacaaacaataagattctattcaaagccccggaatttagcttttgcataacggatatatatagttattacacccgcaaaagtattcttatatgatagacggagcaatcacgaattttaggtattttacacaactattataccaaaatataattaaagcaaaatctttttgcttctgtttaggtattaatcaatagcaaaaagaataactgcatcatttatcctctatcaaaaggcaaatgatgcagctgtcggttatatctgttttttataatgccagacggtatatctctttgctgtcccgtttcgctaatttgacatagttgcctaccaattcacctttattccggtgcagactatctgcaaggcggtcgatgtcgggattctcaatgccaagttctttgaaggtcacaggcaggccgatggaagtaaagaaggatttcagacgggaaattccttcaagggctaccgcctttttatcgtctgattctgccactccccacactcggatggcgtattgggctatcttacccacattgtgttctgtcatccatgtcatccaggcagggaagattacggagagtccggcaccatgagtcacgttatagatggcgctgatttcatgttcgaggaagtgggaagcccagtcctcttcacaacctacaccacaggttccattgtgggcgatcgttccgcaccacatcagattggcacgggctccgtagttttcggggtctttcatgacggtagttgcctctttgatgatggtaagcagtgtaccttcgcacaagcggtcgcctatttccacttcttttgtattggtgaaatagcgttccatgatgtgtgccatcatatcggcaatgctgcaggcggtttggaaaggaggaagtgtgtaggtcagctcggggttcatcacggcaaaaacaggacgtagtacaccgggagcacggaggcttaatttctgtaagccatcgactttcgtgatgacggtgttaccggaaccttcgcttccggcagcaggaatcgttaacacaacggctactttcaatgctttcgtcacaatggcttttccgatgtagaaatcccagaaatctccgttgtaaggaactccggctgcaatggctttcgccgtatcaatcacagagccaccaccaacggcgagcatcatgtctacgttttctttccggcagaggttgattccttcatacactttcgtgtctatcgggttaggctgtacaccgcccagcatacaatagggaatacctgtttcctgcaatgatttctcaacacgggccaacaagccgctacgtatcacggaaccgccgccataaacaatcatcactttacgtgcaccgtatttctgtactaacactccggtctgcgcttccgtatcccgaccgaacacgaattcagtagggctgtaaaagataaaattattcattgtcgttttctttataggtcttttcgtcagtcttttctatagatccagatagaactcctttgacaagtttttctataagttcttttatagagcccttcataagggtctttatagatcagacaaagttataaatttaagcagaatatctttcttttgattgtttaaaatttcctactttcattagtacaagtccgattacaatccagaccatttcgcgtacacgggtaatcaaagcggcatagactccgtaagctccggaaagggaaaggccgcctacggcgagggcaaagccaccttcacgacctcccaattgcataggcaggaaaaacagcagattagcaagtaaagaagagaaagccgcaatcaggcagcagtcggcaaagctgacatgggtggtcagcacgttcagtatcagccatatttcaagacaactgactacacgggcggtatattccagtatgagggcgctataaaaggtttgtttcttttgttggtggagaagggcaatttgtttgtctatattctccaacttctctttatgcgcatttgcaaaatgaaatactttctttttcagaaaaggaatacgaccacccatacggacaaaagccacagccatcccctgccgatagcctttcataaaaagaataacaatcagcaagcaaaagacagtaatagctcctaagattatccccatcatccaccccaccggatagagacaaacgtaaagcaacactgaacttaaccaaaagcaaaagtgggaaaagatatgcatcatcacataaagaatcacggaagaggtggcgcgttctattcctatatagggtttcagctccataatacgatatggttcgcctcccatcagcccaacaggagtcacgtaattaagcgcaaaacctgttactgtgaatttgtagagccggacaaatgaaaaccccgtcttaccaccactacggatgatgatgtaccacgatactgtattaataaggtagacaaacagccatagcaacaaaaccaaaggtaaatatacccctgcacgcttcaaattcagccaaagctcctgataatccatatcaaaagtgaatatcattatcagaacggcaatgataccaaaagcgagaaatatattacggtacttgttcttcactatttgtgagacttatatctattttttatatgggtatatatctgcttttatatgagtatatacttgctttttgtatgggtatatatctcactttattcacatataatcttactttatatacgtataatatctttcgaagaatcttttgaacgccgggattctcatcaatatgtattcgaataccagccaaccgattaacgcgcaagagatgccaagtaatacatcaatgatataatgatggcatgaataaatagctgttccccaaatgccgaccatgataatagagaaaagagtaaccacataccacctgcatttaccaataatggcatacaccaatgcaactaccatataggccgcgtgcagtgaaggcactgccgcaaaaacattagcattacgcccgtagatagaatcaaagatggttactccgaagaatgcatcaaagcgtcccaatcctgcaacattacccggtgtgtttaatatcggttcgaaaccgtagttgatggcataccaaggcggagcggccggatgaatataataaccggcaaaaccaatcaaattgacaaacaagaatactaacgcaaagcgaaggtaggtttttctttccttcttgaaatacaggcaaagaccgaacaggatgggaacgggaacccaacaaaggtagaagattccggcaaaaacgtccgctatcggccagttgtgtgcagcgaagtattcgcaaggagtaaccagaagaccattatccattactccgaaaagagacttttcgagattatacagtccggccacatcaatcgggttcacttcgtagttggggcaaatacgcatccagtcatacgagattccaaaaatggcgaaaggtaacagggccacagccaacttacgagtaggtaatccggcaaaaaataaaactaaatagagtaccgccattaacaggtgctcggaacgaagcccgatgaagatacttgtcagcaaaaggaaaagagccataatgactgtcacagtcagggcttctctcttcgacggcatttgaatattctttatcattataatgttttgattagacaactagactatttactattggactatttacgatgtactatttaggatgtacgatgtaaatagtaaatcgtccaacaataaattaattcattctttcatcgctttgtagcaatgtctcacacgagcaaatgccgtgatattggcaaacagggcaacaaaagccagaggaacaatcataatcaggattggttcgaaaacggtgatatctttgaaaacgccacagaacaaagctccgagactggtcagcactacgcgttccggacgttgcatgaatccgactttacattcaattcctaagccttcggcacgggcacgcacgtagcttaccatcagtgagccgattagtgccacaaatgcaatgagtgcataaaggaaataatctttcattgataaatagtaacagataccaaagaaagtcatcaattcactgtaacggtcgagtactgaatcgtaaagcgcaccgaacttggaactcatgttgcctaggcgagctacacgtccgtccatcatatcgaacagtccggcaaacaaaatcacacctcctgcccagccgataatggccaaatcgttctgtccgccatatatgccggcatatacaaacatacctgccgctactacattcaggataaatccggtagtggtgataaagttaggagtgattcctattttaatcattccgcgtatcaggggattgataatcttataaatcaactgttgtaaataatctctgtaattcatctgtttaaatctgtttatagctatttttatctaaatcttctgttttctcaatctgtatatatctaattctttcgttttctcatcagtcttttcaatccgttttttcagtttctttttccgaataaacttctgatatctatattccggtaaacaaaaaagcgctgcatattataattccaaaacagtgccacgatgattgccactaccactttagggataatgaagaaatctccgaaatacaggctaagtgtgttgcgtacccagggaatcttcgccaatgattccgtcagtgcatacgttccccacgtattgagccaaacgctgcaaacccatacaaggataaattttacagcaacgtgtgttttctttcctttcgatttaaaagtccatttatagttgataacgcaattaacgattcctccatagatagcccccgccagggtggcatatacatagtagacatcaaacagcctgaccagaagaatcgtaacgagaaagtctgcaatagttgccatttgagcagaaagctgcgccctcaaaaacatgaagatgccgcctttctgggaaatcatccgtgcaacttttttcagccaatcacccatctcgctcccactaacaatataaaactatacactcccgccaaaacatcgtccatcatgacccctactccacctttcaggctttccatacgacgtatgcccaacggtttggctatatcaaagatacggaacagggcaaaagccgcaatcacgtaccaaaaccatttgtcatcattgggaacagccaacaacggtatccacactcccaccatctcatctactaccacacgcgaaggatcttctccccaataagtctccagcttatcggcagcccaaatgccggcgaatataaatacaatcaccaaagcggcagtcagccataatacccaagagaaaggaaggagaaaataaagtgcaatccaaatgatagaagccagtaacgccccagccgtgccgggagcaaaaggagaaaaaccggagccaaagcccgtgcctataaaaacaggtagaaagggaggacgcttcatttattactaattactaattacaaactacgagtcggttgtgtcacgagtcccccaacgaatggggaatttgtacaataaaaaagtaaaagttgaggttgagcatccaccagtctttataggatggtaaatctcaatctcaacttattatttggggttactgattaagctaagtaatcaggttctttttcaccaatcatgttacgcaatgtctgttttaccattctccattgtgtaaacaagtcgtgttcgggctgatgttcgaaatcgtgcatcggactcttgcagaagaatgacaaccaagtctggatgccacacatgcctgcacgcattgccaagtcgctgaacaacacaaggtcaagagcgataggagctgcaaggatagagtcgcggcaaaggaagttcaccttgatttccatcgggtagcccatccatccgaagatgtcgatgttgtcccatgcttctttgttgtctttgcggggaggatagtagttgatacgtactttatgataaacatctccgtagagatccggatatttttctggttcgaagatagtgtcgattacagacagcttgctgacttcttttgtcttgaagttatccggatcatcgagcacttcaccatcgcggttaccgaggatattggtagagaaccaaccgttcacacccagcatacgggttttgaacatcggagccaatacggttttcatcagtgtctgaccactcttgaagtctttaccggagataggtacattcttttgtttagagaattcccacatagcaggagtatccacacacaagttaggagcccccattacgaacggagcaccttctgcaatagcagcatacgcgtaacacatactcggagaaatcacgtctgtattgttttccttcattgctttctctaaagcagcgagtgacatgtgttcgtcagacagcggaatgtaaatttcagtacttgcagcccaaagcaccactacgcgttcgcagttgttagcagctttgaagtcgcggatatcctgacgaagttgttctaccatttcccaacgggtagcagccttcttcacgtgtgtaccgttcagacgttttgcccagttgtgatcgaaagcagccggcatcggtttgatagcttccaactcttcttttactccattcaggtctttttctttcaaaacctcggcgtacatagcagcttcgtatgcgttgtccgggaaaatatcccatcctccgaaaacaatgtcttccaaattcgtcaagggcacaacgtccttgatgagtttttcttcgttgttctccatgcgcattgtggctaactgtgtaatagatcctatcggttttgccagtcccttgcgagaggctagtgtacctacaatcatcgtggtagctaccgcaccacccactccgactaccagtacgccaagacgcccggtagcgggtttaatttcttgtttcatttctattctattaaaattaaactaaaattgatgcaaaaataagattaattaattactaatacagtctttatttgtcatataaacattgcaattagcaggatttaacttttaaaaggtcatatggagacttattctcaagcctgatctgtcaatcccgggcgaatcacgataagtgagcctccagatatagtccaaacgtaacaccttgaaaatgttttcaataccgacacccgcctccacataaggtgtttttcccattgtttgtgtgttttctatcggaaaagcgaacaaaccgtcactcaaagccgggttgtttttatcgctcaaatgtccatataatccacgacaggaaactatttccctccattttagttttttcaacaacggtacccggttgaacagccatccgttgaggaaataagtaacatcccacgagaaatattcatcgttcataaactccatcgcattcatcaacgagtaagattccggttggatggtataagaaaggttggcattaggcatgataagcaacggaaaaggtactttatcccacactttacctgcttttagtataacgtccgtatagccgaacgcggaaaaccagaaacgtttctgaataccggcttcggtatgattgtaagtgtaatcgctgcccaacactccttttccggcaatggtatgagacaaggtaaacaccggtgcatccaacgatacgggaaaacggttccattgggtctggaagaatttctcgttcggagcataacgcagtttcaactctgccgcactgacagagaaatcttttaccggggtgtaggtatctccttctttctttaaaaaaggaatcaggtaggaggactcatctttccgtgtacgcgctgtcaactggaaagaaaagccggaataaaactcattggtataggtcatctccgcctgccggaaatagccgatacggtcgtccttctcacgtttcaaggccaggaacacattgtctttgcttgtatacaggtaattttgtccatactggttcacatctgattcgtaacgcaatttcaatgaatggataggaaattcattggcgtattctttcttcttcttgaaagaatattccagttccgccaatcctttcactctttcatctttaaacccgtaagccacatatcctttgccaaacaggtgcggattgagccaggcggtagtcatacctccggcacggatacgggggccttccaatgtgttaccgctgatagtggcattcatcgggccgatatagaaaagtggtgcttctttggaggtgggaatatatcccgtaaagagaatggaaagcactttctccgtccagtaatacaccggataactgcgtaattgtgtcatcaggcggtctaccgagttttcctgctgggagatggcggcttgcggacgattctccgcccagaatgattcgggacgcgacagggcttccgtctcttcaataatacgttcgggtttggtgaaggctttgtcggcttcagcagtcggcgtaaaggtgtagttgctgtaatccgctacccggcgggcaaaaataccgtcctgtccttcggtcagtttaaactcaacagtgatactttcatgatcgagcaggcgtgtgccgtcttcagcgcgcttaaattcctgttcgagcaacatgtagtctacaaagttcaggtttatctttttgggaaagttgaatacggcacgtttaacaaagtaggtagagtcgagcgtcacatacaggtgtccgttgaaaccgaaagactcggaattaaaaggcgtgaaagcgaggtctgcacaaagctctccggcaatctgcaacgtgtccatcaggtaatatttataaaagcctgtgccgatacgggacaagggactgacaaacttattcgtaaacagggaaatgttgttttcgtagatatcgacgtctttgaagacttcattgatggctgcctgcatcccttgtttagagagaaactcatcgacaccggcctgtttgcgtcctttcacccattgcttctcggaacggggagatttccggtaatagtctgtggcaagcagttcacgggctgataccgtcagaatcggtttaccggtaacggcagaagtatctacatattctgtcaggaaatcaaatttacgatatagccattttttctgtttctcttcatcgaagttattcaacgcaaaggtggtcttttcataacgttcgcgttgccagaagtctttctcgtagggagagtagttgtcacggctttcaatcatgcggcggacaaattctacggcgggattatctttcttccggtagtgctcacgtttgggtttgactaccacttcaccaagcgcgtattcggtaggcgcaagtgctactttataggatgcattacgggcagggcgaatggtgcggacatagtcattatatccgattacagagattacaagcactgcttcggagcggtgggttttgaagtaaaagcgtccgtcgcttccggtagtagttccttcggtcgtgtcttttaagcgtacagatgcataaggcaaaggttctttggtcagagaatcagtcaccaccccttgtaccacatactgcgcactgagcggaatactgatagccaataaaagaaagagcgtcaatgtgccttttttcattaatctcataccttaaatcctattgaattgagcggggcaaaggtaggagtgatttcaagacaaaaaaaggtctatttgacggaagaaatgttcttatttgacacaattaggggaaagtaatacggaatcgggtcagtccgtcggcataggttcgcaaagagaatgtgcacccatgacgcatcagtacttcgcgaataaagatgagtccgattccctgaccgttcggtttggtagagaagaaaggactgaacagtttagcttctgtttctttgctgattccctgaccgttatctatcacttcaacagtagccggagcgagggtgcggactattatttccccatcggcttcaatgctttccgctgcatttttgatgatatttacgagtacttgctcaaacaaagcggcatccagcatcacatctttcagactttcgtctatttccatgcggagtgtgatgcgacggtcattacacattccttccataaaccgcttgcaggtgaaaaccaaatcattcagattgacagaagagagtgtcggttcggggattttcaccacatcggcaaaacgggtgatgaaacgactcatcgagaaacaacggtcggtacatacacgcatcacgtcgcagatgtcttccattccttcttcgctggaaagggcttgttctaccgtatccagtgtggaagtaatgccggcagtcgtgttgttcacttcgtgggcaatcatgcgaatcactttctcgtatgctttcttttccgctttcatcacttcgtcggtgagagtttctaccaagtagaaaggatgctgaaatccacgatcaatgaaagaagaatgagtacaccggtagatattcgagtcgttcagacggacggttaccttctctcctttcgggaggttggctaattccaccgctaacggagaatcaatctctttcatcttcttgccttgtacgtcttccaaacgaacacccagcattttcagagccatcggattcaattccgaaaggtcttcatcaagggaagttataatcactcccatcggagaagctttaatcagcaaatcaagaaaattattctgttcacgcaggcggagacgttcattcttgagttgttccatcatgcggttgaagatattcaccacacgatcggcctcatattggcctacaggactaagacgactactgaaatcctgctcacgcaacagttccataccgcttccgattgtattcaacggcttcacaatcttacgatagaaaaaggtcagataaatgaggatgaaaagtatcagcccctcccctatgtagaaaaagattgtattcagttgactggaaaggaacagcaatacactacctaatgccagcagcagaaagactagtatgtaaaagaatccttttatacgcacgttatctgtggttaacggttaatcttaatattattaggcacgtgcctaaatttatcacattgttatattatatttttcgagacgacgatagagtgctgcacggctgatacccaatgccgtagctacctgactcaaatttcctttgtaacggtccaacgcctgaagaatggtctggcgttctatttcatccaaagtcataccggccagagctgcgccttcggtcactcttgcgtcatcgtggcgaatatactgcgcatcaaaatcggaagcatcaagcagcggtttaccacttaccagaatggtacgttccaccaagttcttcaattcacgaatattccccggatagggcaatcggctcaagaattgcagggcatcggcagagaactccgtacggggcaatccgttggttaccgcctgacggtcggcaaaatgacgtgccagcaaaggaatatcttcacgacgttcgcgcagggccggcagtttcactgttatcagattgatacgatagaagaggtcttcacgaaaagtacgttcgcctaccattttgcgcaaatcggcattggtggctgatactacccggatatccgtcttgcgcggacggctgtcgccgagcacttcaaatgtctgatcctgcaatacacgcagtaacttcacctggcacgaagggtcgagatcacctatttcatccaggaaaatcgtccctttgtttgccatttcaaaacgtccgatacggtctgcggaagcatcggtaaaagctcctttcttgtgcccgaacatttcactttcgaacaagctttgggagatacctccaagattcactttcacaaagggatgtttggcacgctgactgttgatatgaatggcctcggctatcaattccttacctgtcccgctttcccctgtaatgagaacagaggcattggtctttgctatgcgggcaatcgtattcaacacatccatcaatccctggctacgcccgatgatgtggctgcggtcgaaagaatcgctctgttcctgcgttggttcctgtggagtgcccgaaagttggagtgccgtttcgatgcgttgcaacaaggcagcattattccagggcttcgttatgaaatcaaaagctcctgcctgcattccttgcacagcaagttggatacttccccaagcagtcatcaatatcaccggtgtttcgggacggaatatttttacttgtttgagtagggtcaaaccctcctcacccgttgtagaaagagtgaagttcatatccatcaggattaaatccggagctacggaacgtaccacttccatagcttcccgtggaccgggaacggtctgtacttcatatcctgcccgcttcaacatgaagctaagcgaagaacgcactgcgctgtcatcgtcaattatcagaatcatagttatatttgagttttgcccagtcaattaacaactttgtctcacactccaaaggtactaataaatagtttgctaccaaatgattgatatataaatcacggaatgcacgcttcaataatacaagttacgtaataaagctgttttcttattattgtatttaagattttccactgcactaaataaagattttcagtacagtaatttataattgtttatgcagtcgagtaattatccagttacaatgggacaaaagtcaccttatagagtgataaatatcatcttataagatgactattggcactctataatatgaccacctgtctccgaaaggattaaaactcttaagatacgaaattaattcgtaaaaagcaagaacggaatagaaaataatactatttactgcaagttcctccataagattcaaaagctttttcctaccctttctattgccggatgatttcatcaaaatcagcttcaagttcggtattggtacgaaaatcccatagcgtcagactgcgaatctgataatagtaataccaataataatagagttcggaaatatgtttctgtcttgcctcatctttagagttctgcgcatcattcaggtctaaggtattaattttgcctatcaggaaagtttcaatactggtcttataacgttgctgtgcaattgcatcggcttccttcgctatgtccaactgctgtgcctgattattgaaatgctccaccaacagaaaaatgtcctgattgaagttgatctgttcctgacgaatttttgaaagcactacatcccggttgctcttggctacccggactttcccacggcgttttccccaatcgagaatcggaatcttaacgcctacctgaacaatctgattatcctgcaggttcctgtaaacggccggaaaattccggttctcacccgtatatcctacgcttgcaaacaaatcgacactacgcaaatttccgcgtgcggtagctacctcatagtcggcttccaactggcggcgacggatattctgtgcaaaagaattacgttccaatgctttatttaacacctgattgtactccatcctcgggccatccacagcttcgggaagaaccgggtttagtacttcatcctctcctactcccaaaaaggcacggagctggaacatcttggcattgagatcactctctgcctccgtcaatgcagctttcgcatttaaagcggagagtttcaactgcaagagttcattctcggaaatttgccccattttgcgtttggcaagggctacttcataaaggtggtcggcgtttgtctggttctgtttcgccgtgccaagattttcttttgccaacaaaagattaaagtaataagtgatggcacgcatcgtcacttcttcggtagcagtgataaaagctgctttcgcttcggcataacgaaccggttcgatgcgtctgttccactttatattattgactccaaagatgggttgtgtaagttgtaatgtgacaggaaccgacataaaatgccggtctcctccggctcccaattgcttgatatagtcgagagaggaagtcagcgagagtttaccaccggtaagccagatgttttgatcgatagaaagatcaccggtaagccccaatgtgttattacggacgaaaccgtaagaaccgtccgaattttgataggaactatacgatttgttataattgggcagggttccggtcaagttgacttccggcagaagatcagcacgaaaggtacgaaattcccaataggccgttttcaattcattcaaggcaacagcagcgtcaacagattgaatacgcgccatagcaatagcttcattcaaggttatttccctttccttctgtgccgacaatgccaacggcaggcaaacggcagcaagagcaaacaatatacttttctttttcattatacacagtattttccactatgagagaatcaaacgatgtgccaaaaaagtaaagtttttattatcaacagattagaaaataagaaaagtgtccattttcggacactatgcccaaaagtgaacgttcgattattcgcagtagttaggaaggcgcacagtgaaacgagtgcctttacctacttcggaggtgacggagatggtaccattcagacgttcgatgatggtctgacaaatacttaatcccaaacctgctccttgggtgaaattatcgactttatagaatcgttcgaatatatgacggatacctcttcttcagaaataccgactccggtatcctccacaaagatgcgggtgtagccgggaacctcatcatcttcatagccgaaagtaatgaaaccgctgctcgtaaatttagcagcgttatttatcagattattcacgacttgctgcaagcgtacattatctgtcgtgagatatttcttatcactttcgggcatacgcaacaccagttctactcccggtggcatattcaagcgttgagaatcatggacggtctttaataacagcggcaggttatgctcggcgaacataaattccatggttcccgattcgatacgtgacaaatcaagaatatcattaatcaaagccagtaacaggccgcaattcttattaatggttccgataaactgggcaatctcttcgcttgtaaaaccactcgtatcgcttagcaaatcggagaaacctacaatcgcattcaacggagtccgaatctcgtgactcatgttggcaaggaacgccgatttcagtttgtcagcctggagggctttatcacgagcctctctcatctcctgctcggcagtcttatatcgctggatactctggcaaacacctaatatattgtacaatgaatcttgtgtcaatcccgtgattacggaagaacgatattcccaccattcatactctccgttgacattccgctgacggaaattcagacgggtattagaatcttctcctgtcaatgctctattaaataacggacttatttccttcaaatcatcaggatagatagtgcgatccatttcatcacgggagatggtagtaaccgattcatcgtatccaagacgtttcaagaaaccttgcgggaaaatgaaacagttggtttccatatcaaactgccacggatagatggagctttcgtctactgccatatcaaagaaacgcttctgcatttcttcattcgaaatattccgtgcggaaagtgccataccggtaatcgtatcctttgaacggatcgggactatttcccccgacaccgggaagtatttatcactatgcacttctttcatgaaagctccctggggtatcttcacactttctcctttagcagctacctgcttcagcatagaatgaagaatatcctgaccgttataatatatcttgaagatgctgcctgccatcattccttcataaaaacggccccctgaatcatacggcaaatgcagcatttgtaataaggagcggtttgtgaaatgaatgtgcaaatcggtatcatacgttatcacaccatcacggatggaatgaaatacattatcaaactcattacgctgttccacaagtttattctgcacgagcagacgggtctgtgcctgaatccgtcgtttggactcacgccggttggcacgcatcaaccacacgatagaagctatcagcaacgccaggatagacggatagagcagtataaaaaggtatttatatttttcccaatacggttcgttgacgatggttccgctagaggatactttatcagggtcaatatgaaaataatccaactgtttatagtcatagatgaatccctgcgtgatttctgtcactcctatttcttggggagatgtaccttttaagactaaagcagccctttgagctgccgataatgctgaagcataactatcggaatcgtatgcacagaatacgccattagttaaccccacattctgactcgaaaatacgggagcttttgagtttttgccaacgaatgaaaggaaaggcgaccatttaggagcaaccaccagacgttcgtagctgttacgagggtaacaaatagcagcaatgatgtgactcgttgtatgattttgggtattatagactttcattctataatccggattgtctttttgaaagattttccactcttcttcaaaatcttcaaggcctttgttactcaaaaagctgttatctatcacacataccacttctttccgctggggaaatatcttttgcgcctgacgcaatatgacatcaaaatccggattggcagtgaacccgcaaacattgggatgagtagcaatcagctccatatcaggatacttaatgccgaaaaacacgaccggtatctgcaaaggcaacgaatctccacaggcaaaaagagtatagaaagcttcatcacttgctgttataatcaaatcggtctgcctgtcacgagcacgctgacaaaaacgacgcataattactttctcggagttgaatgcccaaaaatcggcatcaagatactccgttgttatattcaccttcaggccactttctttaaatcctttgaccaacccctgattaaggtcgctatgccaaggagtctgtgaggtgtatgactgtataaacaggatattgtatgtacgttccgctgctgccgcctgaataagaacagcaaaaaacagaacgataagcaaacaatagtagcgtcgattcatataattaaagcctgcggtgttttcaatattatgccgacaaagatacgttaattatattgaaaacaaacagatagcccaagttttttattcttcgcgcaacgcctcggcagggtgtatgcgaattacctgacgagcaggaaaccaaatgccaacgagaatcattaaagacatcaggaaataggttatgacaaatgtaataagaaaacgcactactccccactccatatacccttcagtcaactccagatggccgatattataacagatgacggcggcaggcaaagcagccagagtcaacaatagcaatccttctttatttaaacgttgccaaagctgcatccggctggccccgactgctatacgaagcgcagactcggcacgacggtgctgcgtacggaaccagaaggtgccgacaatacccaacaggatattaagcaataagaagcccatcatccagaaacgtacctgtacctgattataacttccttgctggaagtcattccgcagatcttcataatcatgcactttcaggatgaataagttaccgacactcaactggttggcggacaatttcatcaaatgttccgcaaagtctctggaagtccccggtttcacccgcagacaaacttctacactcgaaggataaagttcatcgtcaagttcgaccattatcttttcaggaaattcaatggctacataccgatcactgtagttaggccaaaagtcattgtaacgcaccttcttcgaaactccccctatcttgtacactttcgtagaatcatccacatcgaccatttctttacccaacagcgtacgatcgcctttataatctttgggcaagaaattttcaccaacaacgacattgccattctttaaagcttgcaccaacggctgataaccacgcccatcagcactttgataacggaagacctgaaaaaagtcaggggttaccgaacgtcgtagcggattactaaccaatgtatcgatacgtaacatactaccggaattactcccgatatagggacgcgcattattggatattgaaacggcctccacttccggcaatctccggagacgattggtcaactcgataatatcttgtcctaaagatgtactcttttgctctttcgaaagataagaattactcttgtcgtttttcaggcttagctccaaataatacgtatcggtaatatcaaatcctaccggttcgtaataagtacgcgctgtcacatacgtccagtcgaccacataccacaggaccacaaaaacaattaatagttctgaccacaaccatccgtttgaccggcgctcgttccatatttgttttaatagttgcattttctttagaatttagatgagttgaagaattatctttcgttgatggcatccacaatattggtgcgagttactctccatgccggaatggcggcacttaataaattgagtaggaagcaagccagaaatgccagcaggaatacggtaggatcgaacagtaagtcgacacacatggtccgcaaatcttccaccccattggatacaaagtctacggagaaaagcattcctcccaaaaggaaagcggcgacataacttaataccagtccgagaattcctccgaacagggaataaagcatattttcggatagtacctgcatcataagctcccgtctgggggcaccaaaggcttttcgcactcctatttcggagatacgcttacgcatgcgtgacaaagtaagtccggataagttgacggcaggaacaatcaataagacaagtaatgtcagtatgtattgccgtactgcttctttcacagcaggaggattgttggcggaatagcgttgcgcggctacgaaataagtatcaggctgtccgcgatagagtaaatcgaaattgggatgccctgccataaagatagcccgcaagcggtctgcctcctgacgaatagccggaaaatcgtctctcgatttagccagtatatagacggcagtcatacccatgatattgtcatcgccccaagtggctgtgaaggcacttgttgaacttaaaggaatccaaacttgcgcataggcgtacttcgccagtttagagaccggacgtaccactccgcaaacaatataagccgaatgattcagaaggaatgtttttccaaccacttctgatgttccgaacaaacggcgagccatatcttcggaaatcacagcttttgctgctccggcatcaaaatcggcattatcatacggtttaccggatagaaactcaaattcaaatattttccagaaagcatcgtctgtttgcaacacactacaactttccatctcacctgccggtttagcagccagcattgtttcctgccagatattggttatggaaacaacttcgggaattgtcattgctttgaaacaagcctttgccgtattgtatccgatagggccattgctttgccaattcacgttggacttactttgaagtccggcaaaccggaaaataagcatccggtcacgatgggtttccggtgcaaagggagcaatagtcgcacgtaaagtaatcacaattaccattatcatagcaatagccaaagctgtaccaataatggaaatagatgaaagcagtttattttctcccaacagatggaatgcttgtttaaaatagagttttatcatgatcgttaccagtatagagttcagtatatttcttactcgtcttttttattcttcttcgattaggttccacagaagttcgtcaaagaacgttccatattagaaattccatcccttctttgttatatccttacatttcaggtttttgtaattgattttaccaacaccatcctttttaaagaatgcagtatcagtcttacccgataaagtgatattacctactccatccactttagccttgataaggccacagtcaacattcattttcatattgcctactccgtcgacatcgagtttcagttcatcgcaatgaagatttttcacgttgcaatttcccactccgtcaagttcgaaagctatatttttaagattcaatttttcctttgcatcaaagttccctaccccgtcgattttcactttactcaaatcgggagcagtgatgtaaaaaatcagattcttgacattctttacgttcttctctttataatcgataaccagtgtgccgttcttcaccgttacccgggttttctctacaaattcagaaggccctcccaaacggcaggtacattctgccgattgagcgaaaataatatttccgacagattgcaggttgatggcaaagaagtcgcctacattataatctttactcacattttgtgccgatagcgaacaaaaagcaacacttaacaggacagctatcgcaacgataaaaatattctttgtcatggtggtttttaatttagagagatattaatctattttctatttagttttatgtataaaacgcaggttctactgcacctgacgtccgtcaaagaaacggatggtacgcgaagtctgcttcgcctgttcttcattatgggtaaccatgacgatggtgcgtccgtcttctttattcagtcggtgaagcagttccatgacttcggctcccatccttgaatccaagttacctgtcggctcatcggcaaggattatttcgggattaccgataatagcacgggcaatagctacacgttggcactgcccaccggaaagttgtgtaggaaaatgtctcatacgatggcttaaccctactttttccaatacctcttgcgccaaccgctttcgctcactactgccaacacggcgataaagtaaaggcaactccacattatccatcacattcaacgaattaatcaaatgaaaagactgaaacacaaaaccaagcgttttattacgaaaaacggccaattctttgtctttcattccttcggtacgtattccattgatttccactattcccatggtaggtgcgtcaagtaatcccattatattcaacaatgtagattttccgcacccggaaggtcccattatacttaggaattctccacgttctaccgtcagattcacattttccaacgctaccgtttcaatctcatcagtacgataaattttggaaagagagttcaatgttatcataacttctagtatttaaattatttaatcttcagcttattcttgttcttatatgcactcatatcgcttaccactaccctgtcacccggttgcaatccactcaaaacttctacatattcaaagtttgaatcacccaactgtatcttacgtttgaccagttcattgtcagagttgcagacaaacaattcgtattcaccacgccccacatagaaagagccattggcaacacgcatcacatcttccttcacggcattcatcacataaacatctgtcttcaatccggagcgcagacgacggtgattatcttccttcaactgaaccgtgaatgatatgacgccattcttggataacggtgttacactgctgaccgttccttccagtttatcgcttcctatcttaacaattgcttttcctccagctgccacacggtcgccatacgtatcagcaatctcgccttctaccttaaaatgacttaaatcggaaatgatagcgacttgtccgccttcggaaacctgcgcaccaatctggttattaatataggtaagaatagctttgcgcggagaacggatttgcgcatcatccaaagtacgtttcttttcggaaaggctcttgcggaagatattaaaatcaagctcctgaacttttagttcggcggcagctacttccttctcatttttatattgttgctgaagttgttcgtactctaattgagccacattatagctcaattcagcctggcgtaccttatccgttgttcctgcaccgagactgtccagatagtgttcatttctcaactccactttcatacgactcaatttcattgccgaaactttaatctgcatcgccatatcggaaagcttcgtctgattattgacacgaagctgatcgagcttataccgacgcatctgctcttcgtccagcaactttttatattcggtttccgtactctgaagatctagtttcagaatcggagtacctacatctacgctatctcctccttttttataaacttcaagaatacgactgttgattggagaattgattatttcttcaaatgcaggaaccaccttgccggaagcactgacacttacctcaataactcctgtatcgactgtggaaaagacaagatcttttgcctccactcctgcccttagtacagatataagtacaccaatgacaacaatacttgccaccccgatggatgaataacgaatgatcttcttgttacgttctttctgacgtatttctttaggaatttctctgtccatatctgatcgtttacgattttatcatgtatcaatttagcatttcatataccaaatctatgccaaaatcataagtaattgataaatagaatgtaacaaaaaacaaagggtgtccgatatcggacaccctgtacgaatttactgttcagaatatgaatctatccacctgtcggcggaaggtcagtatacctggataatgccggattgtcaactacggtataatgacttctcattgactattttttctcttgttcggaagcttgctgaatctcctgcggagagtgttgcttcggttcctgtatcagttcttttccccaatgggtagtttcctccaccttttcacgatcacgaatctcttttgctttacgggcatagacaatcatacgcatagactgatcgtaagtgaaataattccatacccaattcaagagtacaataaccttattgcgtactccaaggatagaacgcagatgaacaacgagccacatcacccaggcaaaccatccctgcatctttactttactaaactctgctacggcacgattgcgcccgacagtcgccatcgaacctaaattgcggtaatggaaaggtttcatttcctgtcctttctccatacgaatcagattctttgccaatagttctccttgctggatcgccacttgtgccagttgaggatgcccgttcgggtaattttcatcagctaactgaatacattggtcgccaatagcaaacacattattcatcccttctacacggttaaatgaatcgactttaatacgtcctccacgcccaatcagagaggcatccagatttccgatagtcacaccggtgacaccactcacccagataaaagtacgcgtggcaatctctgtaccatcttcgagtactactttatggtcacgataatccacaacgcgtttattcaacaggatatttactcccatttcacggagaaactgttcagcatgtgcagatgattcttccgacattccggcaagcaatcgcggcccggcttcaatcaaatagatgtgcatcagactgctggacatatcaggataatcattcggcaagacaaatttcttcatctcggaaagtattccggctacttctatcccggtagctccacctcccacaattacaatattcaataactcttgttgttcctgcttcgttgaacaggtcagcgctcgttccagattagccagaagagcgtttcgcaatcccatcgcttctgacacatttttcatcggcatggcttcctcttcgatatgtttattaccgaaatagttggttgtagtacctgctgctaacaccagatagtcatattctgcttttccgatggaagtctgtatcatattcttttccgggaaaatggcacgtacttccgccatacggaaaaagaaatctttccgatgctggaatattttacggaaggggaaggatatggaagttggctccataccagccgaagccacctgataaatcaaaggaggaaactgatgatagttgtttttatctatcaatacgacttgaaagcctgactttttcagcttgttagccagtttcaagccaccgaaaccaccgcctactatgacgacacgtttcttattactttttgcaatgtttagactcatattctaatcatgttttatcaagataataacacatgaatgagtcattaagtttccgaaattcgaaacttttgagagaagtctctaccgcagacgcaatctatctccgatttccggaacatactcaccatccttacgattcatcttatacagatttttgaggcggataccatatttttgagagatgccatgcatggaatctccatctttcacaacatatacagtataaggtttggaagcctttttcttcttgctcttcaggtagatgatatctccttccatcaaggtataatcacgctgcaagtcgttgtacttcacaagtttcctccaactaatatcgaattccttgcctaaatctttaaaggtatcaccgttgcgggctaccacataagcaatatcattagcgatatacacctgatgcgggctcatcaaccaaggattctttttcagtttccgttccgaatatacccccttacggtcgtatttatacaagtcataatcttcgataattgtaatcagacgattagcataagaaggatcggtagcatagcctgcttttttcagtccacgcgcccagcctttataatcggtgatgtccagtttaaaaagaaaagcgtaacgggcacctcttctaaggaagtcggaatgatcttcgtaagagtcacgcggatgcttataagcacggaaacattcgttacgggcatcatcatcatgacgaaccgtacgtccccgccaactgccaccacacttaataccaaagtggttattactctttcgtgccaactggctgtatccggcaccgctttccagcaatccttgtgccaatgtaatactcgccggaatcttatgaagcttcatctgttcaacagccaaatcactatacttatttatatactcgacgtaacgggcattccgtttctgtgcctgcactcctacggcaaagaaaaaaacaacggttaaaaagataagtctatgcagtttattctccatttttattcagatgtgaattagatggcacaaaaatctgaaaaataattgggattatcaatctctttcctaactttgtaacattaattgtagaaaccaataccctgacgtatatgaaagacctcacaattaccgctattattaaagtatatcaatatgatgagttgaatgagggcgatcggtcacttataaagactgccatggaggcaacagctcgtagttattctccgtactcccatttctccgtaggtgccgctgcgctattgggcaacgggacagtagtgacaggaaccaatcaggaaaatgcggcctatccgtcggggctttgtgcagaacgtactaccctattctatgccaactcccaatatcccgaccaaccggttgtcactcttgccattgcggcacgaacggaaaaggacttcatcgaccatccgattcctccctgcggtgcttgccggcaagtgattctggaaacggaaaagcgttacaaacaacccatccgcatcctattatatggcaaagaatgtatctacgaagtaaaaagtataggcgatctactgccgttatcatttgacgcatcagcaatggaggattaattatgttacaacaatatcacacgaaactaaaaggaacactcgcacttacagactcttatctgacagaaaaagcactgcaaaaagaaaaagggctttataaatttatatgggtacgcaacggaagcatcacagtagaaatcgaccatcaggaaatgatacttacccaagatgaagtgatttcactcactcatctgcaacacctcgaatttaaatcgattgatggtgaatacctgactttgttgttcaacagcaatttctattgtatctatggcaacgaccatgaagtgtcatgcagcggtttcctgttcaacggttcttctcacctgatccgttttaccctgaatgaaaaagaacgtaaagaactcgacaccattaccgaagcactggaaaacgagtttaccgtttccgacagcctgcaggaggagatgctacgcatcctgctaaaacgtttcattatccaatgtacccgaattgcacgtcaccgcatgaatatcacccgtgaaaaagaatccggttttgagattgtccgccaatactataacttggtcgacgagcattaccggacgaagaaacaggtgcaggactatgccaatatgttgcataaatctcccaagacactatcgaacatcttttctacctgcaaactgccttcgccgcttcgggttatccacgaacgggtggaagcggaagctaaacgtctcctgctttacagcaacaaaagcgccaaagagattgccgatattctgggatttgaagaccaggcttctttcagccgtttcttcaaaaatatgactggacagagcgccgtgcaattcagaaacacacaggaagggaaaaattgacaaggcatacggaagtattgctattttgggggtagtggaaatggacgacctttgcaacataagataaacccattaaaaccccaacaaaatgaaagagaaattgatcgctttactgaccttcacttcaagtctgaaaagttttggtatgaaatttatccgcgttgccatcctggtagtatttgtatggataggcggattgaagtatttccattatgaagccgacgggattgttccgtttgttgccaacagtccttttatgagtttcttctatgctaaaggtgcacccgaatacaaagaacataaaaatgcggaaggtgcttttgtcccggaaaatcgtgcatggcacgaagcaaaccgcacttatactttctcttacggactgggagctcttattatggggatcggcatactggtattcttgggaatctttttcccaaaagtgggattggcaggcgacaccctcgccattatcatgacgctcggcacactttcttttcttgtcaccaccccggaagtctgggttcccgacttgggaagcggagaattcggtttcccattactatccggtgcagggcggttggtgattaaagacattgtgatcctggccagtgccgtagtgttattatccgactcgtcacaacgcgtactcaaaacacttaaaaaagactaagacaaccactaaagaggattctgacttcttgccattgcggaacaaatcgtattttcagactgttatatagtctcatacaaatcattaatacaagaagttatgaaacaatatgatgcaattattataggattcggcaaggcagggaaaaccctggctgccgaactttccaaccgcggatggcaagtggccatcgtagaacgttccaacatgatgtatggaggaagctgtccgaatgtagcctgtatcccaacaaagacgctggtgcatgaagccgaggtttccgctttgctttaccacgatgattttccgaagcaggcgaatatgtacaaacaggccatcggccgaaagaaccgcctcacttcctttcttaggaatgataattacgaaagactaagcaaacgtcctaatgtgactatctatactggaacggggtctttcatatccgccgataccataaaagtggaacttcccgaaggagaaatcgaactgaaaggaaaagagatatttatcaacacggggtctactcccattatccctgcaatagatggtattcagcaaagtcagcacgtatataccagtagtgcgcttttggacttaagtgtacttcctcatcacctgattatcataggtggaggatatatcggactggagttcgcttctatgtatgccggtttcggcagtaaagtgacgatactcgaaggaggaaacaaatttatgcctcgcgaagatcgggatattgcaaacagcgtcaaagaagtgatggagaagaaaggtattgaaatccatctgaacgctcgtgcacagtctatccatgacacgaatgacggagtgacactgacttactcggacatatccgacggtactccttattatgtagatggagatgccattcttatcgcaacgggacgtaaaccgatgattgagggattgaatctgcaagcagcgggtgtaggagttgatgctcacggagctatcatcgtaaacgatcagttacgcactactgttcctcatatatgggcaatgggagatgtgaaaggcggatcgcaatttacatatctctcgctggatgatttccggattatccgcgatcagctcttcggcgacaagaaacgtgatatcggagaccgtgatcctgtgcaatatgcagtgtttattgatccgccattggcacatatcggaatcagtgaagaagaagctctgaaaagaggatattcatttaaggtttcccggttgccggcttcctccatcgtccgtacccgtacattgaggcagacagatggtatgctaaaagctatcatcaataatcataacgggaagattatgggctgtactctattctgcgccgatgcttcagaaatcatcaatatcgtagctatggcgataaaaacagggcaaacctctacattcttgcgcgattttatcttcacgcatcccagtatgagtgagggattaaatcaactgtttgatgtataagaataagaaagagtataactcacttctaaaacagagcctctgaatagggtaaacagaggctctatttggagtaatcggaggctctgaatgaggtaaacggagcctctaaataaatgaaattcattctttttcagtcttaatagagtgaaatctaatagaaagtgttatctttgccgccaagttaaactatatacctaccgcaatgagaattactaagtaagacaacacttctaagtaaacatcacttttcttatatgctttttctattttgttaagcatcacgaaatccgtgttgtttagccagtattgtgtttgtcgttccccctatcctgtgttttttttcactctattttcaacctcaaacccaatagatcgtcatgtctatcagtatccaacaaatcagctatatccatccggataaagaagtattattcagtgacctcaatttcgccatcagtaaagggcagaaattgggattagtcggtaacaatggttgtggcaaatctactttgctacaaattattgccggacagttatcaccctcttccggtgtcattgtccgcccggacgacctatattatatcccgcaacatttcgggcaatatgattcactgaccattgcacaagctcttcaaatagagcgtaaacagcaagctctgcacgccatcctggcaggagatgtctcaaacgagaatttcaccattctaaatgatgactggaatatcgaagaacgttccatcgccgctctcgatttatggggattaggacagtttacgctatcctacccgatgaatctgcttagtggcggcgaaaagacccgcgtattcctggcaggtatggacattcatcatccatctgtcatacttatggatgaaccgaccaatcatctcgattcttccggcagacaacgtttatatgactgggtagaaaaatatcgttccaccctgttggtggtaagtcatgaccgcaccctgctcaatcttctccccgagatttgcgaactaaagaagcatcaaatcaattattatggcggaaattacgaattctacaaagaacaaaaaacgctgatgcaggaagcattacaacaacgtattgaagaaaaagaaaaggcactacgtattgcccgtaaagtggctcgcgaaacggccgaacgcagggacaaacagaatgtacgcggcgaaaagagtaatataaaaaaaggagttccacgcattgtattgaacgcactccaagggaaatccgagaagagcaccagtaaactgactggcgttcatcaggagaaagccgagaagttaacaaatgaacgcaaccagcttcgaggttcgctctctccgactgctgcattaaaaaccgacttcaatagttcctcgcttcataccgggaagatattagtgacagcaaaagagattaacttcagttatcattccaattcggttaacaatgatattctgacgaatgatgaaataaattcgtctgacacaggttatcatcccaatccgaatagcaatgatattcaggaaaatagtatctcaaaacaacagctttggcaagctcctgtcagttttcagctaaagagcggagaccgcctccgtatagaaggagccaacggtagcgggaagacaactctattgaaattaatcaccggccaacttcaaccacaggaaggaaccctgacacggacggactttagctatgtctatttgaatcaagagtattcgatcattgacgaccggaacagtattcttgaacagacttacgctttcaacagccggaatctgccggagcatgaaataaagattattctaaaccgttacttgtttcctgcatccgaatgggacaaatcctgccggaaacttagtggtggtgagaaaatgcgtctcgctttctgctgtctgatgattagtaacaatacccctgatatgtttatcctggatgaacctaccaacaatttggacatacaaagtattgaaattatcactgctactatcaaaaattatgcaggtactgtgatagcaatctcacacgacaattattttattcaggaaattggtgtcgaacaatgcattttattgagttagtctattgatattttatccagggcaaccgcaccaaaatttaattcatatccgcacagttttgaataaaataatggagtattctggaaacgttgtggtaaatctgaaaaagatgattgagtttttaagattccccgttatctttttattataagatatgggtccagggtgaggggtggtgagggtagatttataaccttttattattttattttctatactatctccttttttatcctcaaaaaaaaaatacgaaagttataaatctaccctcaccacccctcaccctggacccattcattagcgcaacgtttaactcgtttctgcacagttatgaatcaaattttggtgcggttgcactgtattttatctgataagtctaaatatcaatctagttttttataacttcgcagcgcgaagatcaagaattagaattaaaatgaatcagacagcacaatcatggtggtttatcttttacaaagaccaactgcttcttgagaaaaaagaggatggtatatataccgtcccgtgtggagaaagctctcctattgttattaaagaaaaaacaaccgtacacaatatcaccacactagaaaggaaaaactgcaaggctttctccctctcctctcccattgaagaatcggagcaatggatcatgatagggcttcgtgcctcctatgaatatcttcctttgtctcattatcagacagcaggaaaagcacatgagattctgcattgggatagaaacagccgcttttgttccgcctgcggcacgcctatggaacagaaagaatctatcatgaagcgttgtccgaaatgtggccgggaggtatatccttccatttccacagcgattcttgtattagtgagaaaaaaagattcactacttttagtgcacgcccgcaattttaaaggaacattcaacagtctcgttgccggatttctggaaaccggagaaacgctagaagaatgtgtagcacgtgaagtgaaagaagaaaccggactggatgtaaaaaatatcacttatttcagtaatcagccctggccttatcccagcggactaatggtcggctttattgccgattatgccggaggggaaatcaacctccaagatgaagaattgagttcgggagacttttatacaagagacaatttacccgaacttcccagaaaacttagtcttgcccgaaagatgattgattggtggatagagcatcccaatgaataatcaaacacggtaaacatcatcaaaggaatccgtcagtatgttcccgaagcctgctaaaagacggataaaatgcatacttactaaaaataatcataaattaaccccatgaaattatcaacaaaaacaccccgaattgaagtagtagatgctcttagaggatttgctgtaatggccatccttctggttcataacctggagcatttcattttccccgtatatccggaaagttctcctgaatggcttaccattttggatgccggagtatttaatgcgacattttcactgcttgccggaaagtcttatgccatattcgctctgcttttcggattcactttctatatccagtcgcacaaccagcagttgaaaggaaaagattttggttaccgctttttatggagaatgatattgctggcaggattcgccactttgaatgccgctttcttcccggcaggagatgtcctgcttctgtttgttgtagtcagtcttgtactatttatcgtacgtaaatggagtgacaaagcgattctaatcaccgccatcttgttttcactgcaaccgattgaatggtttcattatataatgagccttttcaatcctgcttataccctacccgatttgaatgtcggagccatgtatgctgaagtagcggaatacaccaaagccggaaacttttgggattttctgataggtaatgttactttaggacagaaagcaagcttgttttgggctatcggtgccggacgtttcttgcagactgccggacttttcctgtttggcttatatatcggacgcaaagaattgttcgttgctaccgaatctcatttgaagttctggatgaaagcacttattattgcagctatcagtttcgcaccactgtattctctgaaagaacagatcatgcaaagtgacagcagtttaattcagcaaacggtaggcactgcctttgatatgtggcagaaatttgcatttacgattgtacttgttgcttccttcgtgttgctttatcagaaagatcagttcaagaaaactgtatctaatctgcgattctacggaaaaatgagcttgaccaattatatttatcaatctattttgggagccattatctatttcccattcggattctatcttgctccttactgtggatatactcttagcctgattatcggtattattcttttcctggcgcaagttcggttctgcaaatggtggctgtctaaacataaacaaggaccattggaaacaatatggcataaatggacttggataggcacgaagaaataacagaaaaaaagaaatagcactgactgaaaaatagactaagaaagcaggccacgaaatacacataactacaaacgaacaacttacgaatatgaaactgaacgtatcactctaaagcatcaacaaaacatgtgtatccgcagcctgcgggttgaaattgagatgatgtcaatacaacaagattctcgcaagaaggattagcaagtggacttaaagaatgcaaaggaaatgaaagaactgtgccaagttggggaaaaagcccgaaaataggcagaatcagggctatgtatagagaaaaagaagcgcctccataatcttcgaaaagaccatggaggcgctatttattatttatctttcgttatctatatctgaaatttcagaagaaacaaaatcagacacccaatgatttcttcactgcttcaatcttttccattgcagcagattcggcagaagcataacaattgcggcaacccatttcaccctgaacttccatatagaacttaatcttaggttctgtacctgaaggacgaacggaaactttgctaccgtcttcagtgaaatattgaagtacgttagatggttccggcatatcgattgcagttacgttacctttatcatccgtctgtttcagtgtcttataatctttgcttaagatcactttagaaccacccaattctttcggaggattagcacggaagttctccatcatcgctttgatttcttctgcaccgctcttacccggtttcactacgtttacagtaaactctttagagaatccgtattctacgtagatatccagcaacaactgatacaaggattttccattatcttttgcccatgcagcaacttcagcaatcaaacagcaagctgatacggcatctttatcgcgaacgaaatcttcggcaaggaatccgtagctttcttcaccgccaccgatatatttctgtttgccttcacgcagacggatttcacgggcaatccatttaaatccggtgtagcagtcaagcatttcgatattgttcttatctgcgattttcttgattagttcagttgtaacgattgtcttcacgcagaactcgccacctttaatcttacccagttgtttgtactgtgtcagaatataataaaggtacatcatacaagtctgattaccgttaatcagtacccattcgcctttatcatccttgcaagcaatacccacacggtcagcatccgggtcggaagccataacgaggtcagcatcaatttctttggcaaggtttacagccatagaaagagcttccgcattttccgggttcggagatacgacagtcgggaagttaccgtccttaatcatctgttcgggcacagtaaatacgttttcgaatccccacattttcaatgcacgaggaatcaacatcatacctgtaccgtggatcggagtatagacaatcttcatatctttgtgacgggcaatagctgccggatcaatagaaacagttttcaccatatccagataaatcttatcgatgtcttcaccgataatctgaatcaaatccggatttccctggaatttgatatcggcagcagaagcaattgcattcacttcgtcgatgatacccttatcgtgtggagccaatacctgcgcaccatcgtcccaatatgccttgtaaccgttgtattctttcggattgtgagaagcagtcaggatgataccgctttggcaaccgaggtgacggatggcaaaagacatttccggtgtcggacgcatgtcgtcaaacagatatactttgataccattggcagagaaaatattagcagaagtttccgcaaacaaacggctgttgttgcggcaatcgtgacctactactacagaaatctgcggcaggtctttgaagttctttttcagatagttggaaagtccttgagtggcagcacctaccgtatagatattcatacgattgctacctacacccataataccacgcagaccaccagtaccaaattcaagatctttgtagaaagcttcaattagttcggttttatcatcgttttccaacatacgtttcacttcagcctgggtttcagcatcataagccggggttagccatttttcggctttttcagtgacctgtttaataagttcctgattttccatttcgattgttatttattggttaatgaattatttattatcaatttcttgagcacacaaatgtaaaataataagtttataattcctattcttttaattgaaatttgagaattaagaattaaaaagcgatatacttaatacctaatatctcatacttaatatctattcttgtggcactttatatctgtcaccagtctgcttgacatattcctgcaagaattctttcggatatccgggacgcatcactccggcaggttgtccgatagaattacgctcaaacttaccgtctttaacacgtttcaccactccatcattgtatttcacaatcaagaatgtacccaattgtttccaagtatcgaaagtgctctgtgcggtcatatttgtatagtttgtcagaaagtcaaccgctgcgttcttatcttttgccagcagtttggcagccatttcttcaatgccttcctgtgcattgttgaaagtagtttccatttctttctgcgcttcccgtacatcaccgatcatcaaatcataacgcggatagaccatattagatacccagttgaaaatccagaaagcagaattccaggaaaaagtaatataatcggccccatctacacgggtataacataccggcactttagtagcacaacaataaaccggggtaaatacagccatgttcgcatcatccacgccaaaccaaagtacaccgcctatcgggtccggcttatgagcccgcatttgtgcaacaaatacaaacccgctttgttgagtggaaatcggacgttcgttgaaatattcctgaccatctaccttgaagttcagaggagaaagacggtaaggtgtcttataaggtccggctccaaaatcattggagatgtcaagaggcgttccttcataatggtcgcgcatcatatctttcacatcttgcacggataacttatgtttcggtttcacaaaaagaggcatcggcgtattggtctttccctcaatgtaaggaagataatcttttccgttatctgtgaacttattaaaatagctccacacacgagcctcacagaaacggcgggcaccaaaatcaagaggcgcataggctaatgagaagctaaagtctttgtttactccattaaaatatcccttctcacgggcaaaagaaacgacatccggagagtacatacagttttccttgtcgttcatatcaaactggtggatacgtgactggttggcatgggccgaaatacaatcatcgggcacacgtacagctacccaaactgctccacggatgccgggacctttaccaatcatttccataatccatatttcgttcggatcggcaatagtaaaggattctccttcgctataatagccgtattgctgcactaagtcggtcatgatcttaattgcttcacgggcagtgcgcgaacgctgcaaaccgatataaatcagacttccgtaatcgatgatccctgtagaatcggccaattccggacgtccgccgaaagttgtctcaccaatggtaacctgatattcattcatattaccgactacattgtaagtctggcgtgcctgctctatttctcccagatacttgccagtatcccattcataaactttcagcatcgtaccttttggataggtagcagccgaataatgataaagttctccgaataagccatacgagtcggcagaataggaaacaatcgtcgagccatcggcagacgcattttttccgacaatcaggttggtgcaggcgaaggtgttcgccacagccgccatcaatacggcggcacaaagaataattcttctcttcataataaatatatgattcacttttaataatttaccaaacaaagctttcacgggccactgtttcattcccacaatagtcggtcactgtaaattcaacagtatgcttgcctcctttctttacgcgtttggggtccaacgtacattcccagtatgatttcacaatattgggacgtccgaaaagcgcatactttccgtcaatcgttccacgataggaagcaattcccgcgccctgatctttcaaacgatagacaatttttccgtttcttccccactgattcttgttgacagggataatctccggcgggatggtatcgatggcaacagtgtaagttcccaactcccggatagatgctttcatgtatccgtcttcatactttccgcctacgctgtactttcctccttttggagttatgcgggccacataatatttcgtcgtatcggcaattggttttctacgcaacccgatacacagttcacaagctgcatgcagcggaaccgccttatcattcagctgataagtaaaagcaacggcaccactatccgccttcacctgataattgaggagaacatcatcatacaacattcctttcggaacaaccaggttcaatcccggttcttgcagataattagtcttattccaggtaaaataatatttctcccgatgattcaacggttcaatcggctgtttccgaccccgtacggtgaaactatatttggaagtgtttccgaaagcatcttttaatgtatataagaactgatagtcccgttcctcatcaatcgtcaccaagccacggttatcattcgatgcttttagcagacgcaaagtgttgcccggatcaatgaaagatttcatatattgcccgtaagtccaggaattaatcatccggttctcttcctgcgagaagcgatctacggtgctgcgaaatatttcatttccatctaccgtaagcacaactgaataaactccataatggttattcactccatccatgtaatcgtatgctttgatccccacacctatcactccccatgcttccaccggacgctcactattgggaaggatggttttattctcttgctttccatccactactcctttacccagttgtggaaaaaatagaatgccatccgctttcggagcacgcgtatcttttattttcgattgaaagaaaggcatagggtcaatataatctcccgattccgtttcaaatacatccaggtgaagatgcggaccgaacgaatatccggtatttccgctccatgcgatctgctgacctccttttaccggatattctcccggttcgggaacaatctctacttcccaattttcttcttcatattgaagtttctccaccctttcggcaatgggagaaacaaaaccactcaaatggcggttgatcgttgaatagccattatgataacagacatcaagtacatatcccgaaccattcgtgacgcgaatacgcgaaatatagccatcagcgagagcacgaacgggtttaccgataactccgcctgtcttaaaatccagtccgccgtggaaatgattggagcggatttctccaaagttcccactcaatgtaagaggaaagtcaaaaggaggtacaaaggttacttgcttcttctcttgtccataccctccgatgcagcaagccagcatcaaagcagtgatatatcgtctcatcattccgttcacttttttactcccgcaaatgtacactattcccactaaactatgaaatatccgaggagaatgatgaccatagatgctagttaatatttctttttaatgttatattcattgcaaattagtagtcattatgttattaatattagtacttttgtagccgttttttaattataattaaaagttagaaactcaatgagaatgtatgtaaaagtaatggcagcggtcattgcatgtatattgctgagtggagaagcgctctcggcatttgcaactacccccgctacagaaaatctgagttggtttaaaaagaaaaagaaaaaaccagaagagaaagaagagaagagtaaaagcgactacgagaaattagtggaagacagtaaaacgaccaaagggatgtttgctgtacatcaaaagaagaatgattattattttgaaattcccacctcacttttgggacgtgacttattagttgtcaataagctgcaacgagttcctgccgaacttaatgatgcgggtgtaaaccgcggagtaaactatgaaaaccagatggtttgcatggaatgggacaaagcgacgggcaaactaatgttacgccaacaacgtccattacctctggccccccaaacggatgctatcttccgttcggtaaaggataattttatctctccgctgattgccgcattcaagatcgaagcagtcaatgcagattctacggcattagtaatcaaggtgaatgatatttatgatggtacggaaaccagtatcaataacgtatttaccaatattaatctgggtacttcggctatcaagaatttatcacgtattttatccatcaaatctttttcaaacaatgtcgtggcaacttccgagttgactacccgggtaacggaaggtactaccactgtttatgtaacggtggaagttagttcttctattctcttattgcccgaaaagccgatgatgggacgattcgacaatcagaaggtcggttatttcacgaatccgttattaagttttagtgatgcgcagcagcgtacggataagacacagtatatcacccgctggcgtatggaacccaaaccggaagatcgggaggcttatctgaaaggtcagatggtggaacctgccaaaccgattgtcttctacattgataattcaactccttaccaatggcgttcgtacattaagaaaggtatcgaggactggcagattgcctttgaaaaggctggtttcaagaatgcgattattgccaaagaaatcacggacagtatgcatgtagacatggatgatgtcaattactccgtactgacttatgctgcttcggaaaagaaaaatgcaatgggaccttctctgttagatccccgttccggagaaatcctggaagctgatattatgtggtggcacaatgtgctttctatggtacgtgaatggattactgtccagaccggaacagtgtgtccggaagcacgtaatgtacaattgcctgatgctttgatgggagatgccattcgattcgtcgcctgtcatgaggtaggccactctctgggactccgccacaatatgatgggttcatgggctttcccgacagattcattacgttccgaagcattcacttccagaatgaactctaccgcttcatctatcatggattatgcacgattcaattatatcgcacagcctggagatggcgtgaaagttctttctccgcatatcggtccatacgatatgttcgctatcgaatatggatatcgttggtacggaaagagtactccggaagaagaaaaggatattttattcgatttcttgagcaaacatactgatcggctttataaatatagtgaggcacaggacgtccgcgatgcggtagatccacgtgcacagaacgaagatttaggtgatgatccggttcgctcttctttacttggtattgagaatctgaaacgtatcgttccacaaattcttcaatggactactaccggtgagaagggacaaacttatgaagaagcatctcgcctctactacgctgtaatcaaccaatggaacaactatttatatcatgtccttgccaatattggtggcatctacattgaaaatacaattgtaggagacggcgttaaaacttatacatttgtagagaaagagaaacaacaagcttcactgaaatttctgatggatgaagttttgacataccctaaatggctgtttgacacggaagtggggcaatatacttatctacttcgcaatactcccatcggaaaacaggaaaatgctcctacacaaatcttaaagaacgcccaagcctatatcctttgggatttactgggcaatactcgtttgatgcgtatgatagagaatgaatctgtcaacggaaagaaagcctttacagtagtggaacttatggacggacttcataagaatattttcggtgttaccgaacgcggtggcatccctaatgttatggaacgttctttgcagaaaaacttcctcgatgcattacttacagccgctgcagaaccggaagctgttaaaatcaacaagaagatcgccaacgaacatttcttgcttgaccacgctactcctttctgtagctgttacgctgccgaacaacgtgcacttcgtcaggaagagcggatgggggctccacgtgtgctcaatttctatggcagccagctcaaccgtatttcagatgctatttctgtgaaacgcggtgaattattacgtatcaagaagttgttgcagaaccgtctcggaacttccgatactgctgcacgctatcattatgaggacatgattctgcgtattaatactgctttaggaatcaaataaaaccacttattactttaactatctacattaatgagaaaaaaatacttgtgcattcttatatgcctctttgcaaatgcgctggcctttgccagcgctgctaatcgtacaatcaccggagtcgttatatccggtgaagataatgaacctctgatcggcgcttccgtatatgttaacgcagatgacttaaaaaaggccggagcatcacagacttctctaggtactatcactgatatggatggtaaattctccatttccattccggaaaaggtgactagattacattgtagttatataggatttgaagaacaagacatcgttttgcaagcaggaaaagatacttatcgtattgtacttcaagcttctgcacacacattgggagacgtcgtagtaaccggttatcaagaactggaacgtcgtaaactgactgctgccattgccaaagtagatgttacagatggaatggtaggtgcagcaaaaagtatcgaccaggcattagcgggacaaatcgccggtgtggctgtaacgacaacttccggtgcaccgggagctccagcacgtattcgtattcgtggtactgcttcactgaatggaacacaagacccgttgtgggtattggatgggatacctttggaggggacagatattccggaaatcaacaaagacaacgataatgacatcgtaaatatgtcacaatcttctatcgcaggtttaagtccaaacgacattgaaagcattacgatattaaaagatgcagctgctactgctatctatggtgcacgtgctgcaaatggcgtaattgtggtaacaaccaaaagaggaaaaaccggaaaacctgttattaacttcaatactaaattgacttatactccaaatctcaatacttcacgactcaacttactaaactcggaagagaaagtcgatttggaacttcaattgttaaaagaagcacggtttgacatattatggggattaacagatccgataccggtatttcctgaaaaaggaaaagttgctgctatcatgaaacaatataacttaatagacatctataaagaacaggggtggaacggactgacacctgaagcccaaaatgctataaacaaactgaaaacaatcaatacagactggaatgacatattattcagagatgcttttacgcaagaatataactttagcatttctggtggtagcgaaaaggttacttattacaactcacttggttatgtcaaagaaaacggaaatgtaccaggtgtaagcatgagccgttttaatctgaccagtaaaacgtcttaccaaatcaacaaaatattaaaaattggaatgtctatttttgccaacagacgcaaaaataacacatttatgactgatacttacggacttattaaccctatatattattcacgtatcgccaacccttactttgctccgtttgacgaacaaggaaactacctttacgattacgacgtagtcagaagtaatgaaacagatgaaaagcaaggctttaatatattcgaagaacgagcaaacaccaataaagaatctgtcaccacagccatcaattctatctttgatgttcagctacgttttaacgatcagtggaaagtttattcacagattggtgtgcaatgggatcaattgtcgcaagaagaatatgccgggataaattcatataatattaggaatatacgtgaaaccaataaatattggaaaaatggtgtacaaacctatcttataccagaaggaggcatgcttaaaacaactaatagtacaacctcacaactcacatggaaaatccaaggagaatacaaaaacacatttggggatatacatgacatacaaataatggctggttcggaaattcgcaaaaactgggtagacaaccaagcctcaaccggatacggatatgatcccaagaaactaacattccagaatctcatatttaaagatgaagcacaagccaatgattggaatctaaaaactaaatcgtacaaggaaaacgcttttgcttctttctttgccaatggttcatatactttaatgaatcgttatacattgggaggaagtgtgcgcatggatggttctgatttattcggagtagataagaaataccgtttcttaccaatctattcggtaagcggtttgtggcgtttatctaatgaatcgttcattagacaatacaaatggattgataatttagctcttcgcctttcttatggcttacaaggaaatattgataagggaacctctccattcctagtcggaaaatatgataatgtgaatattttaccaggttacagtgaagaaaatattattatcaatagtgctcccaacagtaaattacgctgggaaaaaacagcatcttacaatctaggaatagatttttctgtactcaatcaagccatcaatcttagtgtagattactactatagaaaaggaacagacttaattggttctaaagcattagctttagaaaatggattcactaatatgtctataaactgggctagtatggaaaataaaggtgtagaaataaacctgcagacacgtaatatcaccactaaaaacttctcttggtacactactttcaacttcgcatataatcaaaataaagtactaaaagtacttacagataaaagccaagtgactcctagtctggaaggatatcccgtaggtgcaatctttgcactaaaaacaaaaggtataaatcctgatacaggacaaatctatcttgagaataaagaggggaaagctgtcactgtagaagagttattcagaatgacatcgaatgaagatggtcttggcacttaccaaataggaccaagtactgaagaacaaagagacttttacagctatgttggaacgtcagatgctccctacacaggcggttttctaaatacgttcaattaccgaaattgggaactgaatctgaatttttcatataattttggagcacacgtaaaaacaactccaagttataatgtatctgacttagacccagggcgcaatatgaatagagacatactggatagatggacaccggaaaatacaacaggaaagttccctgcattagcaacgtacaattacaatccggccgactactacttgttcagtactcgaaatgacatttacagatcactggatatctgggtaaaaaagctaagctttgtacgtctacaaaatatacgtcttgcttaccgggttccatccgaatggcttcataaactaagtatcggcggagcaactgtaggattagaggctcgtaacctattcgttatcagctctaattatgataattatatggatccggaatcaatgggcaacctatactctaccccagttcccaaatccattaccttcaatctaagtcttaacttttaaaaaatatattatgacaaagaaaatatattatatattcacattaataggaagcctgttattatcttcctgtgatagttatttggacatacaaccagtaggccaagtaattcccaatacgctagctgaatacagagctttattcacaacagcttacaatacagcactcaatgacagaggaatatgcgaaatcagaacagatatcgcaaccatattacagtctgatgccacttccaaaaattctttaggagatgttgaaaaatggaatgatgttaatccgaatgcaagtacgagacaatttggatgggcggcctattataccaatatctattatgccaacgcaatcatcgataaaaaagatgaaatatcagaaggaagccaagaagatattaatcaattagttggagaagcttacctcatgagagcatatatgcatttcatattggtcaatctttatggacaaccttatacagctaccggagcattagaaaccaaagcagttcctctaaaactcaatactgatttagaagaaataccatcaagaaatactgtaaaggaaatatatacctctattttatctgatatagaaacagcacggaaactgattaataaaaaagaatgggaaattcaatattcataccgtttttcaacattatcagtagatgctatggaatcacgggtatatttatacatgggtgaatggagcaaatcttatgaagcttcggaacgtgtattagccggaaaatcgacattggtaaacctaaatgatgaaggaggcaaacttcctaatgaatttacatctgtagaaatgatcactgcctatgaagtttttccaaatagcgattatgccggatcactcttactttacccttcatttttacaagaatatgaggaaggaaaagatctacgtccaaacaagtattatcaagcaaataaaaatggaaattatacttccatcaaaagtggtgaatctaaattcaaatgtactttccgcaccggagagctttatttaaattcagcagaagctgctgcacatttaaacaaattacctgaagcacgtacccggctcttgaaactaatagagaatcgttatacatcagaaggttatgagcagaaaaagaatgaaataaacgcgatgagccaagaaaagctagtcacagaaattctgaaagaacgtgctcgcgagcttgcttttgaaggccatcgctggtttgatttacgccgaactacccgaccggaaatcaaaaaagaaattgaagatgtaacctacacacttgtacaagatgattcccgttacacattgcgtattccacaagatgcaattgatgctaatcccggacttttaaactaataaccaagcatttttcatagaaacaaaccgcctgacatcatagactaaaaagctccctttacctaaagcgtaaaaggagctttttttaatctatctattagccatttctcattttgtacacctacctcattcaccattaaatctttatcccctaaaagcattgttctttaacaagaaatccgtatctttgtagcgacttattacgattaataacgtagaagcgtttagaatattatctctattcagaatctggtaaattctttaattggggagataatggcaactaagcgttcacgtctttgttatatgcaagggcgtggactctgttgttcatttcccaataggtttaccagagccttgaatagaatgaactaacgacgtccacgcttctcttgtatatatatggtatccggacgcttaccacacaaacaataaaggtaatgagcagcactattacaaagttcttcgcttcttttttagcttatggggtagctaataagaaaaagcgcttctcggcaattggccgtttctccgaaggattggctccggtaaaaggaaaaatccaatggggatacatcaataaaggatatgacgttgtcattcctctaatgtacgaacgggctttctcttttaaagaaggattagggatggtagtactcaattctcaatacggattcatcgaccataccggacaaatacagattccgtttaaatacacagccgctcactcgtttgaacaagaatgtgcacgggtatgccacgatggattatggggattgattgacagacaaggaaactacattcttccaccgacttacagtcaaatagaacaattcgcggaaggattagctctcgtctcgctacacaataagataggattcattaacaagaaaggagaagttgtcattcccctggaatatgataatggacgctctttctctgaaggattggctgctgtttgtattgaaagtcagtcgtccaagtgggggtatataaacaaagacaatgaagaagtacttccttttaagtacgatattgcagaacccttttataacaacatagctcgagtgggtctctatggaaaaagcatgaaaatcaacaaacagggcagtgaatgtctataaaacaaccactctacgcatttattcatctcaacacgcaaggcattctgttctaaaacatccccttacgaataacaacgtaaggggatttttcgtactttcgaacatgttaaatctttaatacgtaacattatgattatcggagtaccaaaggaaatcaaaaacaatgagaaccgtgtaggcatgacaccttcaggagtggccgaagtggtaaaacaagggcaccgggtgtttatccaacatacagcgggagtaaatagcggttttccggatgaagcatatcaagctgtcggcgcacatgtcctgccaacaatagaagatatttacgccactgctgagatgatagtaaaagtgaaagaaccgatagtcactgaatataacttaataagaaaaggacagttactattcacttatttccattttgcttccgacaaggaattaacccttgctatgctctctaacaaatcaatatgcctggcttatgaaactgtagaagaagcagaccactcattacctttattaattcccatgagtgaagttgccggacgtatgtctatccaagaaggcgcccgttttctggaaaaaccgcaaggcggaaaaggtatccttttgggaggtgtaccaggtgttaaaccagctaaagtattaattttaggaggtggagttgtaggtagcaatgctgcacaaatggctgctggaatgggggcagatgtcactattacagatataaatctggcacgtctgcgctatttgagcgagacactgccgaagaatgtaaagacattgtacgcatccgaactaagaatcagaaaagaattgccggatgttgatttagttgtcggctctgtactgattcccggtgataaagcaccacatttgattaccaaagagatgctttcaataatgcagcccggcacagtattagtagatgtagcaatcgatcagggaggatgtttcgagacctctcacccgaccacccacagtgcaccgacctatattgtagacggaatcgttcattatgcagtagctaatattccgggagctgtaccttacacttccacccttgcactaaccaatgctaccctcccctatgtgatagctttagcaaataagggatggaaaaaagcctgcaaagagaatccagcattagcactcggattaaatatcgtagaaggaaaaatcgtttataaggccgttgccgacgtatttggtttgaagtacgatcctatcaacctgtaactatgcattttcaccatacagtaatataaagtcttacagagttctttctttttttcaaagtaaggctatctcaatgtcttacgtcttcgattgataacctttaaaaaactctgcaagactttgtattactctgtggtgagctatatctttaaaataaataatctttctttgccgcccgttgataagccgctaccaattcgttcattacttctgccacagactgccgacgggatatgattgccgaaacttgtccgatctccaattccccttcttccagatcaccttcaaagattccttttttagcacgcccccgtcctaataaagttctcaaatcttcagcactagctccactatcttcagccttctccaccgcttcgcggaaagcattctttaccaaacgtgttggagccagctttttcaacaacaacttagtatccccttctctgagactcaagcaataatctttaaataccgaactcgctgaactctcttcagtaagagcaaaacgggttcctatctgcaccccttcggctcccaacaccatagcagccaatactccttcccctgtgccgacacctcctgcagctatcaaaggtaatgttgtagcctcacgtacagccggaatcaaacagaaagtcgttgtttcttcgcgtccattatgccctccggcttcaaacccttctgccactaccgcatctactccagcctcctcacattttacagcaaaacgggaagaagaaacaacatgaacaaccgttattccacgctctttcaaccacccagtccacgttttcggatttccggcagaggtaaaaacaatcttcactccctcttccaccacaatattcataatctcttctatctggggatacatcaaaggaatgtttacaccaaaaggcaatttcgtggccgcattacatttacggatatgctcgcgtaaagtgtccggatgcatggaaccggcaccgatcaatcccagtccaccggcattgctcacagcagaagcaagacgccaaccgctgcaccacaccataccaccttgaataataggataccgaatacccagaagagaagtaattctattcataaccaataatttatctatgtgttaatatactaagataccaataatagcgacaaagctatataacaatgcgccaacataacaacacacaaatatactaattattcaattacaaacattctctagtcagtacattagcgcattgctacatcaacacatcattataacgccttcaacgggcaatctgttcaattggtttatttatcaacacagtggtagaatctccataagttctcaacacttccaatgtgcgggcacggttatcccgtcccgtcttattccagaaatcttttgtaaagacagccatcaggtcaagtccgccgatagttccaccattgatatacactccactcccaccaaacaagggaataggtgcatccatcactaccgtgttcaccatcattccgttagcacgttcacccaactgacggaaacgcaccccactcgcctgtatctcatccaacgacttacgcattccctttgccatcggattgcgtgcccagtttgaataagatctttgatggcgtatctcgtagaaaggatcaccccgccaggtatttttatcgatctttatcttcttctgatagatgggatcccagttatagcgggtattcgctttatatggcatcagagtcaacatcactttcggtttaggcaacgcttcaggaagcgattcgtcaggcatcatccagcttttctcctccgacatccggggagtacccactgcgcttccgaaatcaatcgatttcacagcatccatatttaaatgcaactcctggtcactctccagcaatttcttcaaatgcaaagaatcttgcgccgtccatacttgcgaatatgcaaatacagcagtcaagcacagtgccatcgttgttataaaccgttttaatccatccatcctttttactctttcattacctatatttcggagcacttcatatacatttgcacgtatgagagcctatcgtttgagcgtaataatcccctgtcagcagcaaaagactgctgatacaaacaaatgttcccacatgaatgtttcctattttttactttccgaaggctcttcccctttattaccaccaacgataacccgatccgcaaagcggctcatcgtagcacggatcaattgtccatctcgttttcggatattggcgttcttcccaccaactacgataacaagcggctgcatcgagtacttcctcatcggtcaggaaatagattgcttcataattttcagcattcgccaataccattttgcaacctaatgacggaggtgtgccctgacggatagattcaatcacccaaagcatacactcacccaaccgaatcttaccgttgttcatattataaaccgacggaaaagaagggataatagtcagatcttctgcatattttaaaagttcggggatatcctcttccgtgaaatgaggaacctccaccacccctttttcattcttcatcttgtacgtacccgacttcaattgcttcacaaaaagagcaacatccggattgttataatccatttcttcgctggtgcatcctgtaaaggatacgatcaggcaaacagccatccacagcattagtagtgtttttttcattttcataaggattaatacgtcatgcggagtccgcaaagtaaattaaaattagtcggccgttttgttcgtaccgtagccaatttcgaatctgtcttaaaatgatgcgaaactccgggttcggcaaaaacagcaagtcggtcattaatcttatagttgattccaataccggcagtcactgccagctggataggttcttctttaaaactgttgtccggtgcaccggcaatacatttatcggctattcctcctacagtagcgtaaaggtcgatttttttcgtatctaccaacgtcacgttcactttaacggggattcccagatagtgcaagtgctgccctgcagaacggaggttcgaatagagcaatccggtttctatgccaagaaaatcgttcaacttacgctctaccgtcacccctgcggaaaccggcattttataagtaccgttatctgccggaagtgctgtacccacttgaactttcatcacccagcgatgctttttcactgctttgggttgagacatatcgacattcgactgttcttccgaagcgacagatgatcctgtattaccgtttgttgcctgccaataaccattatgcccctgattaccatatcggttgccatttcccgtagaagtagtggaagaaaaagaaaacgacatagagaaagtgattgaaagagaatcttcttcctccgtatattgcgacagcataccgtaagatttcggagccggtttcggcaacaccggttctaccggcaacggcaactgattgacgcgtattccatctccatccatctgtcctccattcgtcacggctatctttgtaaatgcttcttccatttcctcctttggagagaaatacaagaaagtagccgacgaggctgccaaaacaagcaatacagatgccgcagccgctacacggaagagcagaatccgacgacgatgctggcaagccacaggaatttcctgcgagagctcttcccaaaagccatcccgtacactcatcccggcatcagcgagacgcgtgcgaaacagatcggttatttcatcattttctttcttcatgatttctatactctttaattctttttgctaacaaatatttggcccggtgcagctgcgaagtagatgaatgctctttaatatgaagcatcttggctatctccttgtgcgatttctcttcaaacacataaaggttgaaaacggttcggcaaccatccggcaattcggcaataaaagccatcaactgctcttcggagattccagcccctcctcccgaatccgatatatccggtatatcgggaagctgctcttcatgcactaccaactggctgactcgcttctcccgtcgcaggaaatcgagtgattgagtaaccatcacccgggtaatccatgtacaaagtgaagactcaccccggaacgaaaagttggtaaaaatcttgatgaaaccgtcatgcagtacatcgtgcgccgcatccatatcgcccgtatagcggaaacataccgccagcatctgcttggaatagagagtgtaaagttcctttcgggctgaatcctttcctgcccgacagccctttatcagttctatctcgttttccaaagtcaattacttttttttaaaatcgaacgtatgtctgcgtcgtttgctcattagacgcgagagtttgaggaatgctgcaaggaatattgctaaaagaagttaaaggatagataataataaacgggaaagaaaaaacgatgaacgataaacggtaaatgatgaacaaagctgcgcataatcatgctacaaaatatccaccgtttactgtttatcgttcaccgcttacagttcaccgcttattatactatcagcatgctttgaaactcatgtccagtcctttcactgaatgagtcaaagctcctacagagatgaagtctacgccacattcggcatactcacgaagagtatcaaaggtgataccacccgaagattcggtttcgtatttgcctgctaccatctctactgctttctttgtcatttcgggagtgaagttatcaaacatgatacggtctactccgccgagatcaagaacttgttgcagttcgtcgaagctgcggacttctatttctattttcaggtctttacctttttccttgcaatattctttggcacgagtgattgctttgtcgatacctccggcaaagtccacatgattgtctttcagaagaatcatgtcgaacagaccaatacgatggtttactccgccaccgattttcactgccattttttcgaggatacgcataccgggagttgttttgcgggtatcaagcacacgggtatttgtaccttccaatacctttgcatatttacgggtcattgttgcaatgccgctcatacgctgcatcacgttcaacatcaggcgttcggtttgaagtaaagattgcacttttccttccactaccattgctacatcacccggtttcacttctgttccgtcattgataaacacttccactttcatggtaggatcaaaacggttgaagatttctttagctacttcgatgccagccaacacaccggcttctttgataagcaattttgattttcccattgccgtagcgggaatacatgaaagggtggtatgatcgccatcacctatatcttctgcaaaagcaagatcgatcaacttgtcgatcagttctttttccttattcattgatcttgtcaattcttatttgatgtattaaatattgattctgcactttcttcaggaagcagttcacacgaaagttcccattagtagtagccaacgtaccgataacgaaactcgattcgtcccgttttccctgatggttcacattaaatccgctgactttattcttcgtaaagaattcctgcatcgcagctgttgctttctgtttgtcaacgtttgtcgagcgaccttggagcaccaggtttaccttgtcccccatatacttacttagctcttgcgagcttcctcttttaaatgccgtaatcactcctgccggtatctcttgcgccattagcaacgagagggaaagaagcaatgcggtcattcctacgagcactcgttttttcataattacaagcttttaagttgaagtttaaaggcttaaactttcaactaatgataggcaaaggtaagcattaattgcagaataacataaaaaatgcctatttttgtgcaataatcagaattgtagacgtatgaaaacaaccttgctcgtcgtaggacgaaccgtagaacaacactatataactgctatcaacgactatatccagcgcactaaacggtctatcacttttgacatggaagtgattcctgaattgaaaaacacgaagagtctttcaatggaagtgcagaaagaaaaggaaggggaactgatattgaaagctctccaaccgggcgacgtggtggtattgctcgatgagcacggaaaagaaatgcgttctctggagtttgccgaatatatgaagcgaaaaatgaacacggtcaacaaacgactggtattcattatcggagggccttatggcttttctaaaaaagtttatcaagtggcacacgaaaagatttcaatgtccaagatgactttctcacatcagatgatccggctgatattcgttgagcagatttatcgggcgatgactatattgaatggagggccgtatcatcatgaatagtaacttatctcatatactattataaacgagacaaaatagactttttaatttcgtcccaagatacatccacaaacatataaggcattggctcctcctccgcatcttcaaaataagctaaacttttcatagccataaaagaagatgagtcaggatatttttgagaatagaaatccaatagatttttcaatgaatactttttcaacaaaaagtaaatatctacaaaatcttttttagtacctctcccttcaatagcagtaattttcattgccgcaatatctctaggacttgccaaacgtatcccatctttatatacgacatcatcaagccaaggataagtatagttcacgatatctattttaacctcattcaatacgtaaatgtgtatattcttagaatcatttaagatagtcagtgtcccaagtgttcgcaaagcctccttcaaatcttgagaatctacattaatctgaccaaaaaaatccaaatcgaccgactttcgatgtcctaattgcaaagctaatgcagtaccaccgactagacgagtattacaaagtacaggtaactgttgcaacttttttaaaagttccagtgttgtggattcgaccgttgataagtgtaacatctaaattgttctttaggagtttgtgaaatggcagaaagataagctaaagcccgaggctccaattcacgaaaccccttagctatttcgacgattctcccaagtccataatattgttttacaatattccaatcttgcaacataccatattcaagcactctctttattatatattgtgaatgcttctccatatccaaatcatctttattgacatcccaaaaaagatatgttgaaaatcgagtaatatattcttccattatctatcgtattgcaatccttaaatatgacaaagataaaaataaaaaatgaatcgaacgcaagctaacagctatatttcacaaaactgtattattctcttcttcatagattttattaaaaactctacaaagttttttttcatccgcaattagttgacgaagttctgccaaccgtccggcattatccgattggggtatccataacgtcagataccctccttctgcatatttttcagttagatgtttccgaaaacgggcatattgctcttctttatccatctccggataatgagacagcccatattgtacggtacggcgtaaagtgacttcgggatcaataattcggtcagcctcggcaacaatcattccatagattgttctgggagcctgtttattggaagcccgatgatcttctatcgcctctttcatctgcaacagctgctcatccgtaaaccaacgccgcaaagtttcgtcggctaacaacactttgccggaggttatatgatgaaattcacgtccttcatacaaccccaggtcatgataagcagcgatgacataaaccatcgaataatcgacttcataatgcgtcgctaatttcagactttcctcaataaccttttctacatggtcaatttgatgcgctttatcaaagttagcgtattgaggaataatactttgccgaacatagttttgcaattcagcaggcacatgatgagtcatattcgatctttttagctagtgaattcttttatttatattattcccgattcatcaaacgatgttctgccatctgttcgaactttgttcccggacgaccataattggcatacggataaatggaaataccaccacgaggagtaaatattcccgttacttctatgtatttgggactcatcaatcggataagatctttcattatgatattcacacaatcttcatgaaaggctccatgactgcggaaactgaaaagatagagtttcaaactcttactttctaccatttttatatcaggaatgtagctgatacgtatttcggcaaagtccggctgtccggtaataggacacagacttgtgaactccgggcagttgaaacgtacccagtaatcattttcaggatgcttattatcaaaggcttccagtacttcaggagcataatcttgtttatactcggtttttcttcctaataaggaaagttggtcttttaattctgtcattgcactcattaactacaacctctactctaaacaaaaaaacgcatttcttctttcacctatcaccgtcctgcctcaaacgccttattcatcgaggttttagtggtgaaggattcatttcacaacctatcaccgcatctatcacctatcaccatcaactcttatcctacgtttgctttctcctcatcttacttgttacggtgtgtttcattgcctgaaacaatgtgtttcccgccttgaaacaaagtgtttcattacttggaacaaactgtttcaagtcttggaacttatagtttcaagcgttagaaactttagtttcctaccgttgaaactaatctaagccaatacattctgtactgtactactatcatttattaattagaacttaccggtgacaatagatgtgacggcaaaatgtcaaatttagctgctgtcactacttgctgtcacaaactaaaaatcttataatcaaacatttatctacaacaatgtgacagatgacagcaaaaaaacgcattttaatctctatgtagagatattattgattcttactttttaaatacttttccaatccttcccgacgcaatgtacaagccgggcaatgtccgcaaccatctccctgaacgccattataacaggtcaaagtctcggtgcgaatcagttccaatacccccagttcgtcggccaatgcccatgtttctgccttatcaatccacatcaaaggggtatgaatcacaaattgttcatccatagccagattgagagttacattaagagatttgataaaggcatcacggcaatcgggataaccgctgaaatctgtttgagaaactcccgttaccaaatgattaataccacgttcacgggcatatactgctgcgatacttagaaaaaacagattacgtcccggaacaaaggtattaggaacgctatctgcaggtttttcctgatccatcaccatcgtagtatcggtcaatgaattatgacctaactgtccgataaaggaaacatccatcacatcaaattccacttccgctttccgggctatctcccgtgcaagctccacttctttctgatgcttctgaccataaagaaaactcaaggcatatactttcttaaagttgcgttttgcccaaaacaaacaagtggtagaatcctgcccaccactaaacacaaccaatgctgcttctctattcatattctatattaaatatctttgactttcaatacattataagagatattggtgtcgtaaacatcgctaccgtctattttcttgattgctttcaccacacgaattgtcaccggaaggataataacttcatacatggatttcagcacaatctgaatccccatcatgataagcagttctttccaggcaataactccaccaaaagctaccgggaagaaaatcaatgaatcggcagtctcacctacaacagtcgaccagatggcacgggccgaaaagttacgcccctgactggctactttcatcttactcatcacatacgcattgagaaatgagcctaccagaaaagccatcagactggcagccacaatacggggagccataccgaacacaaaattgaaatgttcctcgccctcccagaaaggagcagccggaatggcaacagctatcaacccaagagcaaccacgaagaagttcatggcaaaaccgctccaaatgatgagccgcgctttcttgaatccccaaacctcggcgatacaatcattaataatataagaaataggaaaaaccaataatccggctgtcacggtcagactacctacctgaattacttttgtttcaagaagattggctgcaatgagacagacattaaacagaatgcccagcagcataaagggtacagatactttttctttcataattcctgttttttacgtggtgttctagaatacacgaccgctattcacggcatcatacattttttattctttcggagtgcaaaggtaaaaaataaaactggaattatcacattcatcttaccagaatctgtcttcccgataattgaagaaaaaataagcctccctgtcagtcgtcgtattctgacaggaaggctcatcactttgaccttaaaaacacatcactcaatcaggcatccgcatcaagaggagaagtctttcaattcctctttcaaccgcttacggatgaaaaacaaacggctctttaccgttcccatcggcaatcctaatttttcggcaatttctctatacttaaatccggctacaaacatctgaaaaggcactttcatctcttccggtatggaatgtatcacccggtacaactgtttcatatcatacgtaaactcgaatctatcagcatcttcatcttctatcagatgttgttgattgatggagtaactatcatcaatcaggttcatttcacgaactgtgcgacgatagttgttcacgaaaatattacgcataagcgtatacatccatcccttcagatttttgctatacgtaaacttctcctgattatctaatgcctgcaacaaacaatcctgaaccaaatcattagcagattcgcggtctgccgtcaatttatatgcgaagcgatgcaaatccggttgtatcgctaatattccttgagtaaaatcaactttttccatcgtcgtatttcctttatctaattagtacgatacaaaggtccgtttttttagaatcattataaatagcaattcttccgattagtttggcaatttttcctttgcccctctcaaccatttctttttttagttgttcattgggcattcacctaaaacttaactgataatgaaaacaagctttaaaatggtagctatgctactggggataggaattttccccctctgtgcctatgcacaacagaaggtagtcatcgaagatgaagaaccgaattctatcatgtttgtttcgaaaaacaaagcaggagatgaaatcatccgaatcatgaacgaccgttcgcagatgcgtttccacgacccgaatgctccccgtttcctgctaaccgaccagaaagggaaatttgccctgggtatcggaggatatgttcgtgcaacagcagagtatgactttaacggtatcgtaaatgatgtcaatttctatccggcattgattccacaacgcggaagcggcaattttgccaagaatcaattccagatggacatcaccacttctaccctattcctcaaactggtaggacgtacgaaacatctgggagacttcgttgtctacacagccggaaacttccggggtgacggaaaaacctttgaattgcagaatgcttatgcgcaattcctcggtttcacgatcggatacagctacggttcgttcatggacctctccgcactgcctcctaccatcgactttgcaggtcctaacggatcagccttttaccgcactacgcaattgagctatatgtgcgataagttgaaaaactggaaattcggtgtttcaatggaaatgccttcagtagacggtacaaccaacaatgacttgtctatcaacacccaacgaatgccggactttgccacttccgtacagtataactggaatagtagcagtcacgttaaattaggtgctattgtccgtagtatgacttactcaagtaacgttcatgagaaagcctattccgccaccggcttcggtctgcaagcatctacaactttcaatattacgaagaaattacaggcattcggacagtttaattatggaaaaggtatcggatcttacctgaacgatttaagtaatctgaacgtagatatcgttcccgatcctgataatgagggaaaaatgcaggttctcccaatgctgggatggtatgcagggctgcaatacaacctttgtccgagcatctttatatccggtacatatagtttatccagactttattctgaaaacggatatccaagtgaaaatccggaatcctatcgtaaaggacagtatttagtggctaatgctttctggaatgtaagcagtaatttgcaagtgggcgtagaatatttaagaggatggcgtactgatttcagttccgcaacccgtcatgccaaccggttgaatatgctggtgcagtattctttctaaactaacatagaacagtaaaacaaaaaagccgtctcaacatcatgtccgagacggcttttatatacatataaaggattagaaatttagaacttgtaattcacgctcacgccaaatactttattggtacggctataaacgtctttatcaatagatgcacctaatccacgtacattttctttagtataatcactatacgtagtccagaaataagcaacatcaaggctcaatgcctccgtgaaattaatacggcctccgaaaccaactgaataagaatcacaagagaaacttgtatccgattggaaagcatcgctcaatccgtagtctgttttctgataacctccactgactgtgaacagtttattgatatcccattcaacacccgccaaatactcgtgtgtaccatgtttcagtgttttctgcttgccatccgccataccggcattcttatcatcaaagaaatgatattctaccgatgctctcaatgatggcaagatctcataacttgcagctaaagaaagcatagcaggaagatcactcggagtgttcacaccattctgataaggtgccataaaatctgcggcagcatccggagcagttatgtcatgtgtatcattctcaatattcatattggctttgaactcatactttgcagccagattcaattttccgaacttagcatcaataccaataatcggtgtcaatccccaacctgtctgatcgcagtctaatttaagtttcgcatcattcagctgctgcgacttttgtaatgctgcctgttgtgcctgctctaaagtcataccggcggccattagtttttttacaatctcagcacccaactgttctgctacaccctctttcaaattgatatcaaggaaacctttatagccacccgtaaaataattcatacgtgcaccagcaaaaactgcgaagtgctcattaattttatagcttgctcctaattgaaaaccataaatatactgacgaccttccatagccgaattaatagcatattgattaggagacagcatcccttgaccgattgtatttaccagactaatagcagccgcatcaaacataggtaaacctttgtcaaatgaagcttttccgccaccacctacaatggcaaagctaccggaaaacgcccaatcgccttttttatagacagcatgtatagaaggaataacgggagcagaagcttttccttcatacttacgtacagtattctgtccgtccatggtccataaaggacttgttgcagcaatatcacgggtctgatatgcactttgaatagtaagtgctacttgaagaccatctttgggaagaaatgccagtccggcaggattactataaactccatcaacatcgatggaagcgccgcgggctatcatgcgtaagaaagcagcattctgattcgtattggttagataatctccagcaaaagttggaattgaaacgatcaacattgcaagaccaatcaacgaaatttttctcatctaaatcttttttaaaattatttcggcgcaaagatataacaatattgcacagggagcacatatttgtgcacttattttcatttatccgccattttaattgaaaaatcaaactgtttctaatgaaacaatctatttttcgaatgatggattgattaaacaaattcacctgttccaacgtttaatattatataatttatagaataatattatggcctatacaattgcatttttcggcacaaagccttatgatgagtcctctttcaatgacaaaaacaaagagttcgggtttgagatacgctactacaaagggcatctgaataagaacaacgtactactgacacaaggagtggatgctgtctgcatctttgtgaacgacgttgccgacgcagaagtaatccgtgtgatggcagccaacggagtaaaactattggcactacgctgtgccggatttaataatgtagatttagatgctgccgccgctgccggaattaccgtagtacgggttcctgcctactctccttatgccgttgcagagtacaccgtagctcttatgctatcgctaaaccggaaaattccccgtgcttcctggcgtaccaaagatggtaatttctccctgcacggtctgatgggattcgatatgcacggaaaaacagcaggcatcatcggtacaggaaaaatcgcgaaaatactgattcacatcttaaaagggtttggaatgaacatattggcttatgacctctatccggaccataacttcgcccgtgaagaacaaatagtttatacttcactggacgaactatatcacaattcggatatcatctctttgcattgcccgctcaccgaagcgaccaagtatctgattaacgactactctatcagcaaaatgaaagacggagttatgattatcaataccggccgtggacagctgattcacaccaatgcactgattgaagggttgaagaacaagaaaataggttccgcaggactggacgtatatgaggaagaaagcgaatacttttatgaagatcaatccgaccgcatcatcgacgatgatgtactcgcccgcttactttcattcaacaatgtgatagtcacttctcatcaagcttttttcacacatgaagcgatggagaatattgcggcgaccaccctgcaaaacataaaagattttatcaatcataagcctttgctaaatgaagtgaagaaataaaacttttaagctcctttctttgtttacaaaacatataaacaaataagagaaaggacagattttatgaaaaaagtaatacacaaagcagatacaagaggacattcccagtacgattggttggatagttaccatacttttagttttgacgaatacttcgactccaatcgtatcaacttcggtgcccttcgcgtattgaatgatgacaaagttgcacccggagaaggttttcagactcacccgcataagaatatggaaattatctccatccctctgaaaggacatctgcaacatggagacagcaagaagaacagccgcatcattactgttggagaaattcagacaatgagtgccggaacgggaatcttccacagtgaagtgaatgcaagccctgtagaaccggtagaattcctgcaaatctggattatgccaagagaacggaacacccgtcccgtttatcaggatttcagtatcacagagttggaacgtccgaatgaactggcagtcatcgtatctcctgacggcagtacacctgcttcccttttgcaagacacctggttctcaatcggtaaagtagaagccggaaaggaactgggttatcacatgcatcaaagtcatgcaggcgtctatattttcctcattgaaggagaaattgtagtagatggcgaagtgttgaaacgccgggacggtatgggtgtttacgataccaacagtttcgaactggagacactgaaagattcacatattctattaatagaagtacctatgtgattccatcattagaaattaagaactaaaactgccagataatcttatggcgaaattaaacatagcagatatccgacaggaatatacgaaaggcgggttgcgggaaaatgaacttccgggcgacccgctttcgcttttcaaccgttggctacaagaagcaattgacgcagaggtggatgaaccaactgctgtcattgtaggaaccgtatctcctgaagggagaccgtccacgcgtaccgtattattaaaagggctccatgatggaaaatttgtcttctataccaattatgaaagccgtaaaggcaggcaattggcacaaaatccgtatatctccctctcttttgtgtggcacgccctcgaaagacaaatacatatagagggaatagcgacgaaagttcctccggaagaatcggatgaatatttccggaaacgtccttataaaagtcgggtcggtgcacgaatttctccccaaagtcaacctataacaagccgaatgcaattaatacggtcttttgtcagggaggcagcccggtggatcggaaaagaagtggagaggcccgataattggggcggatatgccgttacccctacaaggattgaattctggcaaggacgccccaaccgtctgcatgaccgttttctatataccctgcaaccggacggggaatggaaaatcagtcgtcttgctccttgatttcgtcgatttttcttggcaactccaactagaatacgtaatattgcaattataaaatagtcagcttatgacactggattatatttatcacagcggtttcgccatcgaaatggaaggtgtaaccgttatcatcgattactacaaagattcttccgaaacggaacataaccggggaatcgtacatgattatctcctgcaaaggccgggtaaactatatgtattggccacccatttccatcccgaccactttaaccgtgagatattgacctggaaaaaacaacgccccgacattcaatatattttctccaaagatatcttgaaatcccatcgtgccaaagccgaagatgctttctatattaaaaaaggagaaacatacgaagacgagacaattcgtatcgatgctttcggctcaacggatgtcggcagttcgttcttgcttcacctgcaagattggagtattttccatgccggcgacttgaacaactggcattggagtgaggaatctactgaagaagagatccgaaaagccaatggtgatttccttgcagaagttaaatatttaaaagaaaaagcgccaaacatcgatttaatactattcccggtggatcggagaatgggaaaagattacatgaaaggggcaaaacagttcatcgaacaaataaaaactactatatttgtgcccatgcacttcagtgaagattatgaggggggaaatgcgcttcgtagttttgctgaaaatgccggatgccgttttatcagcatcacccatcggggcgaaagttttgagattaccaaataaacacatgataattatgaataaatttacgattctgtttcttaccctgttccttgcattgccgatggcgatgaaggcagattctgcaaaagagaagaaagatgacaccaggtaccttgtaggagctgttcctgaagtagatggtaaagtagtattttccaaagagttccagattcccggaatgagtcaggcacaaatctacgacacaatgacaaagtggatggacgaacgtctgaaagaaaataaaaatattgatagccgcattgttttctctgacgaagcaaagggaacaattgccggtgttggagaagaatggattgttttcagttccagtgctctgtcattagaccgtacactggtcaactatcagattaccgttacctgtaaacccggcaactgcctagtagagcttgagaaaatccgtttcacttatcgcgaaacagagaaatacaaagcggaagaatggattactgataaatatgcgctcaataaagcaaagaccaaattagtgcgcggcctggctaaatggcgtagaaaaactgtagacttcgcagatgatatgtttatggatgtagcagtagctttcggagcacctgatactcgtccgaagacagagaaaaagaagaaagaagaagagcaacaaactccatcaatcgttgcagccgcaggcccgattatcattggtggcacagataaaaagactgatattaaagtgacgaccgccgaacccgttcaaactacagttcctgctgcgactctcactcctgctactccagtaggcaaagcttccacagatatgccgggttatacagaaattgatttgaaacaaattccgggcgaagtatatgccttaatgggaagtggtaaattagtaatcagtattggaaaagatgagttcaacatgaccaatatgactgcaaatgcaggtggtgcattaggttatcaatcaggaaaagctgttgcatattgcacactttcacccgaccaaccttatgaggcaatagaaaaggcagacagctatacactgaaattgtatgccccgaaccagacaactccttcagctgttatcgaatgtaagaaaatgccttcacagacaactccgcaagccggacaaccccgtacctatgttggagaaattgtgaaactcttaatgaaaaaataaggaaaattgcaacaatggaaataaaaagtaaatttgaccattttaatatcaacgttacaaacctggagcggagtatcgctttttatgagaaagcactcggcttaaaagaacatcatcggaaagaagcatccgacggttcattcacactggtttacctgacagataatgaaactggtttcctattggaattgacatggctcaaagatcatactgctccatacgaactgggggaaaacgaaagtcacctatgttttcgtgtagccggtgattacgatgcaatcagggcctatcacaaagaaatgaattgtgtatgttttgagaacactgccatggggctttatttcattaatgacccggatgattactggattgaaatactcccacagaagtgattttatataaaaagtggaaggtgtgtcaaaatgcacaccttctgttttttacgcacaaagccccgactttcacaagctggggctttgttattacctaaagattttgtatctttaggcataagaatttcactatgacaaagatacattttcgtccttacaatcccaaccaaaccgttctttttcctcaaagaattgatgaggatattgcagaaaacgatccggtgcgcatggttgacgccctggttgagggcttgaatcttgaaagtttcagaaagctgtataaggaatgcgggcgcagcccttaccaccccaggatgatgctcaaggtcattctgtatgcctatatgaacaacatctactcctgccggaaaattgaaaagctccttcaccgtgacatccattatatctggctggccggatatgagaaaccggatttcattaccatcaaccgtttccgcaaccgggtgaagaaggaaatcaacgaggtgtttacgcaaaccgtagttcttctctcttccaaaggcttcatcagcctgaatgtggaatacattgacgggacaaagatcgaatccaaagccaacaagtacactttcgtctggcgaaaaacggttgagcggaaccgtgaacgcctgatgaagaagatacatgtcctgttagggcagatagacgatgtcattgcccgggagaagtcatcagagaacaatgaggaggttgggttcactccggccatgctgactgaaatggcaggagaattgcgtcatgcactggaacaggtttccgagccatccgcgaaagaggaaaagactgaactgaaaaagaaacgcaaacagttgaaggaactggaagaacacagggacaaactgcaggaatacgactgccatctggaaacgctgcaagagaggaattcctattccaagacggacaaggacgctacttttatgagaatgaaggaggatgccatgcgcaacggacagacgaagcccggttacaaccttcaaatcggcaccgaaaatcagttcatcaccgattttgcactcttcccgaaccctacggatacactgaccctgattcctttcctgcaatctttttcaaacaggtatgaccggatggcccatacggtggttgctgattccggctatggctccgaagagaattaccgcttcatgtccgaaaacggcatggaagcctacgtaaagtacaactatttccacatggagcagcggccgagattcaaaccggacccgttcaaggccgaaaacttctactacaatgaagaacatgacttctgcatctgccctatggggcaaaggatgcggaggataggcaccaggaatgtgaaaaccgcatccggatatgtcaacgaaaatgcacggtacagagctgtcaggtgtgaaggctgtcccctgcgatgccgctgttttaaagcaaaaggaaacaggacgatagaactgaatcataggcttagacaatacaagcggagagccaaagaactgctctgctctgagaaaggactgaaacacagagggcagagatgcatagaaccggaagccgtgttcggacaaattaaaaacaatatgaactacaaacgtttccgacattttggaaaggacaaggtcttcatggactttgccttcctagccattgccttcaatataaaaaagatgtgtgcaaaactgacaaaaaagggtatgaactggctgattagactgttttatgagcttacaactgctgtttttagatgctgggaacacataaatcaaagaaatcttcaaaagatcgcagcttaaagaaagtgaacagatttgtatagtgatgaacaaaaaaagaggtgcatcgtgcattacgacacacctcccactttttatgtagaatatatgatctatcaaacacatagtatatatacctaaaacaacaaatactataaatatgtatccgaaaataaacaccaccttgccagttgcttaatcagaaaaaagccactcctcaatgactaaaaggcaaccggattgatgatccgtttattgctacagcctttattttttatgtcggctagctcttttcttccggatatctgctttcatcttcgctgcacccgaaccatgttgtccacgaatatacgtcgcttttttcgctttcgttttcaccttttcctcttctttgggcttatctttcttacctttaaaaacgataccacccatgattgcttcttctatactcatataatcatttattagtattcaacatttccgatggcaaagataacccttttctacggatttatttatctttgcaaagttaacaatcgtaaccaccaatggcaacaacaattctttctgcagaaaaggacccgatgggagccgctatttctgactatttcaaccatcatagagctgatcgtttgcgggtattttcttctcaattcgaagaagatgaaattcccgtcaaagaactgtttcgtagtatacagtctatgcctatactagagcgtaccgccctgcaaatggctactggacggattttggatgtaggtgccggaagtggttgccatgcgctggcacttcaggaaatgggaaaagacgtatgcgccattgatatttctcccttatctgtcgaagtaatgaaacaacgcggagtgaacgatccccgcctcatcaacctttttgatgaaacattttccgaaacattcgatacaatcctaatgctcatgaatggttccggaatcatcggacggctgaataatatgcccgaatttttccaacggatgaaacgtattctccaccccggtggatgcatatttatggattccagtgatttgcgttatctttttgaagaggaagacggtagcatagtcatcgatctggccggagattactacggagagatcgacttccaaatgcaatataaagatgtaaaaggagacacattcgactggttatatgtagatttccagactcttagcttatatgcttccgaatgtggttttaaggcagaattgataaaagaaggaaagcattacgattacctggtcaaacttagcattgcttgaaaatgcatcttcatatagtgacggtatacactccggatagcgtcactatataaccaaaatagtaacgccatcacatcaggatagcgttactatttttatatactcatatatgttccgttggaaacatctgatgaaggctctcttttatttcagcatttcattaattgcctgcacaagagaagcaaactcttcctcattatataaacgagttagctttacaattttcccttccttatcaatcaacacgtttctcgttattccagattcacgtaatgcatacttcgcaaagatatcagctcccggatccagtcctaacggataagtgactccggtagattttgcaaaagccagtactttgtcaagcggttcgtcacggtcaatgccaatcagagcaaagtctgcattatttttatgcttcaaccaaatatccttctcgataaacggcatttctttacggcaaaccccacaccagcttgcagtgaactgcaacatgacaactttaccacgaagggaagataaactcacttgcttcccatctgtcaaggtaattgtgaaatccggagccatctctcctacccgaacaatatatcctgtactatctgcctgaactgattttgcatccgcagttacttctacactatctgttgcaacttcaacattcgccgttcctttcttctgtccggaacaagcccatatacctatggctaaaagcgccacactacatacattcataattttcattttcatctaatcattggtaactttgcaaatataaaaaaagtatgcgatgtatttgcatttttaaaagaaattcatatctttgcacccgcaaaagaaaaacgcctctttagctcagttggccagagcacgtgatttgtaatctcggggtcgttggttcgaatccgacaagaggctctccagaatgaatgctgtttatcacatcagataagcagcattttttattaatatcttctttaagatttttgcttacgaaatactaccatacccacagccaacaaaatcaaaagaattccaatagcactattcagggtaaacagttctttaaaaacaaagacaccgatcacaacggctgtcagtggttccatcgcacctaaaatagaagtcagtgtaggtcccgcatacttaattgcccgtaccaaagttatattggaaatagccgtagccggcaatgcaagtcctaaaataatcagccatatataaccgtctgtcaccagatgaagcccggaagttgccatagctcctatcagatagaaaacagctcccatccccataacataacatgtcagtacagtggaattgatttgagcggctcgtgttgttcgaaccccaatgatgtatcctccgtaagaaaagacagaaatacaagccgccaccaatcctactattgtatcaccacttttcgcctccaactctcccgatgacagtaaagcagcaccaaacaaagacattaaaacagcaagcatcaccaaaagagatttcttttcatgaaagaaaaacatcattgccaatgatacagccaacggatacataaaatgaatagtcgatgctacccccgtggctatattctgataggcaatgagcaaactgaatgaggtggttgcccgcaacaaacttaataaaaaaacgactaacaaatctttctttgccagccggaaattacatcccgaacaccatccaaacagtgtcaatacaatagcagccactccccaacgataagaaagcacctcgaaagccgaaaaaccagctaacaacagagttatagaaaaaaacggagccagcccaaaagtggaggaggataccgccgcataaagtatacctttaatacgattcatcgatatattcaactaattccagatattcacaatgcaaagattataaatatttctttaatgccaccattaatttcattttttcaatcggcttaaccagatattcattacagccgacctttattgcagcaatccggtcagaatcgaaagcatgggcggtaagtgcgacgataggtaagctagcattaaacttacgtatttcagctgtaaccttcaatccatccagtacaggcattttcatatccatcaacaacaaatcgacatgttggctacgcgctatttccactgccttttgcccattctccgcatgcagtaaatcataatgatccttcaggatagtagacaccagctgataattactttgtatatcttcagctatgagaattgttttccgaccggcactcttctccatcacttcgtcattcgcaccaaactctcctccggagatattctcttctttcttctcttctaccatagaaagtgtatcgacttcacaaggtaaaaatgcccaaaacagcgatccttcattgtgtaccgattcaaagccgactttacctcccatagcttctgcaattgccttgcaaatagaaagtccaagtccggtaccttgggcaaactcatcaagtttctcaaaacgctggaatacttttccttttttatcatcagctataccggtatctttcacataaaaatagacgcctccatccttacatgcatatcccattttaatagaaccttttgaagtatatttgatagcattagtgacataattcgttataatttgtgccacgcgattacggtccagagttacccgacaacagtgataaggattgatttcagttaacacgatatccggattcttcaggcgctgcttcatggaagtaaacatgttttcaaaatgttcggataagtcgaacggttcgtatttcagttctaccgaaccggcttccagcttggataaatcaagtatatcatttatcagttttagcaataactcattattactattaataatctggatatagtccgccttttcttcttctccggcataagccatcaactccgaaaaacctacaatagcattcaagggagtacggatttcatgactcatattcgccaggaacgcagatttcaatttatcagactgctctgcctgatgtttggcttcctgcaattccttaatcattttttcacgctccgttacatcatccacgcgaattacaacaccatccacagatccatcttcaagaactacgggagtggcaaacacttcaacggtatgcgcactgtccaacgaaaacttcatctgttccgtctgtaatgaaacaaaagcacgttgcatcacacaattttcacagggagaagtacgattatatgtacttttatagcaaagttcaccttttttgtaggcttcaaaagaaagactttttgaacataacgaaatattttcccattgaaccatatattccttcgtgatgtaggccaaccctgaattcgtattgttaagaaccagttcattctgtcgtaccaaagcgtcctgtatttctttattctttagtaaggtcaattcagtctgcttataggaatcgatattttgcgtcataccgaacaaatacttataaggagcatcgttcaaagttgtggtttcaacaaggccacgcgtttcccaccattgatacatgccatctcctttaaagtcaatgcgatattccacatcccatacaccgcttcctagttctaccgccttttgcaaagtttcagcaaacttttgtcggtcatcaggatgtacgagagtcagatatttctcgaccgaattaatttctgatgcctttttcccatttttatcaaaaccttcaccgaaactcaccctgttcttagccggctcaaaaaaccaggtgaaggcattcatcgcttccatagtgacagttagcagctgtgcacgacgcttcagttcattttgtaaactctgatcccagcgggtatttaacagaaagcgtttgccatcatcttcaattatacttttgcgaacaatagtatcatagctgcgtccatccttcagtataatacgttccatgccgaaataagggttcccagtattgtatacctctaaatcagtcttctgaatacgctctacttcttcttcactcagcacatcataagtagttttatcttcgctggtaccaaacatgagcttactctcttcattgcaaaaaacatagcggaaatcattctctacatctttgatatgaacagataacggaagattatttaatatattatagaagaactgctcctttttctgcacctccgtattattctttcgggtaccaacatatttcaataccttcttattagaatcaaattcataaggagcaccgcttatcgtacaaaattgccaggttgagctatccggtaacataaccctgctatcaaaagaaaaagaaaaatcttccccattgctcattctttccattacttcagtaacctgactacggtcatccggatgcaaagtctccagatatagtgccatactaactggcttagactgatcgtatccattcagcggttcattatcactataaaataatttggccactgcatcaaattcccaaaacatgatgttggctgccttcatagcaagctccgttttccggcgactttgacggagtacctcttcacttttcaccgtttctgtaatatcttcaaagataaaaatgtaattaacaaacttgccatcattgtcataaagaggattaccattacatttcaaatagcaggtccgggtacgcgtagagaaaaagcgtttatcggttctctgtttatcgaaatcatacaaaaaactcatctgtaccggaacacaacgacgaactgcttccttcaccacgtcaggaaccacagaattttcatttatgttgagtttattaccaagaagcgtttgcgagtcagcgccaaaaattcggcagaagctttcattgcatcttaccagagtgccatcggctgtgaagaaacctattccaacaggaagtgaattaaatacagttagtaattgtttgtgttccatttctttatccttgaataacttagaaataaatattttatctccgcactatgcaaatatatacacttttacgattataatatgattttatagcgaaaatattattgccaggttataacatacaataaggggctatccacgatattgtgaataacccctatctcaaatgacatcccatatattatcattttaaaaagtacattttaatactcctcaatgactgtatttccaaaaatatcctttttaataattttcccatgaccgttaccatattcaattatttcgtttccaaaaatatcttttttaatagttgttctattccccttatcatcctcgataatagtattcccaaagatatcttttgtaatcgtctttctattacctttgtcatcgcgaataatagtatttcccagaatatctttctctatagtttttctattacccttatcgtcccggataatggtatttcctagaaaatcttcttcaatagtctttctattacctttatcatcacgaacaatgaaatttcctaaaatatcctcttcgatagtcgttctattgcctctatcatcacggataatgatgttccccaaaatatccttttcaatagtcgttctattgcctttatcatcacgaatgatgatattccctaagatatccttttcaatagtctttctattaccattatcatcacggatgatgatattacctaaaatatccttttcaacagtctctctcccttggtcaactcccgaatactcataattatcttcaacaagatttgcaccatagccctttattatataaggagccaaaataaactgggcaacaaacaggataaataaaatcttttcatggcgtttttcttttgatttagaacaaaagtaacgcaggaaaatcagaataaataagtgaattccataattgtcagtagggaaaaacctaaaataaaaaggattagcgcatgcagtaacggtatatccataatatactacctaattggtccccagaatggtccccccaaaaagaaattccttgaaagtacttgactttcaaggaattcaaagtgttacttgaggttcctggcgaacctctttttctttattttccttatttattagataaaacattatttttataatatactgaaatacaataaattatttatcacacaaagaaaatagaataaaataagataaaagtttgtagtaccaatgtagtaccaaatcaaaaagaatctctatctttgtagtaccaacttataaaagtaaaaatatgggtgcaacattcattttgagaactgacaaaagcgaaggatatgcaaccttatacgctcgcatacaaaacagggttccaaagattaacattcgagtatctaccggattagaggttgatataaaagagtggaacaaatctttaacaggagccaaagctctaacagctttcaggacaggcaaaggaaaagaactttaccttaaactagacgctatttcatcaacgattgacgcactaataaaaaatggtgtagccataacttccgacatggctaaagagcgtatacatgaaatagtatatgctgaacagatagcagccgagaaagaacgagcagaagccgaagctaaagccctagaagaagaacaggctaccaacttcaacgacttcatagcacaattcattcacgaatgtgaaaccggaaaacggaaaaagaaaggaggaaccacaaatatatctcttggaacaatcaagagctacaaaggctttcaatcccagtttaaagcgtatcaggaaacaaggctaaaggttattgattttgaggacctgacaatagagttttataatgacttccgatcattcctcacagataaggaatattcccctaatactatcgctcggatggtgaagatatgcaaaacgatatgttatgcagccgagcagcttaaacttatggatgcggcaaacgtccggtttggttttgatgtaatctataaagatgttgataatgtctatttgactgaagaacgaatacaggaactttatgagtacgatttgtccaaccgtccggcatgggaaaagataaaagatgtgtttgttgtcggttgcctgaccgggcaacgtgtaagtgattataagcgcatcaatgcaaagatgattgttacccttaccgatggcaataagtacatcaaacttaaacaggaaaagaccggaaatatcgtttatattcctcttgattatcgtgttgcaactatccttgacaaatataacggtacacttcccaaagtctacgaccaaaagataaacgaccatattaaagagattggcgaagctttaggatggacggaaatagtagagtttgacgaacaacggggagcgatggagtataccgctaaaaaacgtttctgcgaccttcttaaaactcatacctgccggagaagtttagcaaccaatatgtataaagccggggcttcattaagttctataatggctatcaccggacacagcagcgagcagcaactaaaaacatatcttaaactggatgaatcagaaaagagtatgctagcagcaaaagaagattatttcacgaaattacgaatagctaaatgagaatgtgacattttaacaccctcatgaagcaacaaaaaaatgattgtttattaaaagttatgtaaaaatggaaaatatacgagccttttattacgatttcagaaacaaactaatacagataaaaatagattcagatatcagtccattaaaggattatcaaactaaatcatatgatatttattcaagccgcattattgattatgatttaatgcataaatcattagataatataaccaataaattattgaatttacattgtagagaggatagatatatatatgctaagcttctgataaacaacaacaatgctcataaaacagtcattgaagaacttatagacgatagttttaacgacaaaattgtattaggtattgattcaggaatttattatataaaatcagaaaatgatatctctattgaactaaaaaacgaagattatgagaataaacgtttatcccatttttacaaggaagaacttattccgtttgaaaatatcctttttaataccctttatgatttcggtcttaatattgaatctgtaggtatacaaagggaacgttcagaagttgacctgactgatattataaaatccgaaataggaaatagcccaactagaagtaggcaatttacgactaaaagacaaacaatggcaattgttgaattattatccaagttaggaattaacacaggaaatgttgataaaacagccatagctggatttatccaatttttaacaggtaaacaatctgaatcacttccgcaaaatacaactgcatataagttgattgaaaggaaagatcctgattctgaaaaagaaaaaaacagctttaataatgattgtgattttgttgcttcatattttgaaagtgtggggctgatttctttggcagataaaataaaaagaggaaaagtttaagattctactctaatttaggatatggttaggatatcctaagcaataaaacgcaaacaaactttgctccgtaatcaaaaacgaaaggttatggagcaatttatttctacccctaattcaatacttattcaaggcgcaacaatgagtgaccttgaaagtatgttgagccgcttacttgacaagaagttggctgatataatagattctactctcaaagtagacgtaagtcccaaagacggactttacaaacgtaaagtagcagcagaaaagctacaaatctcccttgttactttagataactggactaagttggggattattaacgcccgaaaagttggttcacgtgtatattacactgatagtgatattaataacgccttgaaaaaggtatctaaatcctaaagacatgggaaagttagacattaacattacccagacgcaacagatcgttatgggcttcatctcccctattattgacgaaatagtagacagagtatcagagagagtattagccgcatcaaagaaagaaccaaaattctacactcgaaaagaagccgctgaaatccttcatgtcaccttaccaacattggcaaggataacaaaagacggacttcttatctccaagcgtgtaggtagtagaatcctttatgaagcagacgctattgatgaggctgtaaaaaaacaggtcgtattcaaatatcggagggcatgactatgaaagaaaagaaaaaagcagcctccacaactgccaatccccttaatgacaggagcaaagataatcattcctcacgaatcatccaacaggtacgatctattttcttatctggccggaaggtaacagcaaaagaaatcaacgctgaaacaaattcgaatgatgccagacgtgtaatctccaccctccgcaatgatgaaggctgggatattaaagacgttcgtctggacgatagaagaaaactatattggttagagccggataaacggcaaatgtctattgattgggaggatgcctatggaaagtaaaagacaaagagatacgtttattttctatcgcagtttcaaagagagcatgagcgatttatcggacgctgataagttgattatgtatgaagcgataacagattacagcctcgacatgaaagagcccgaattaaccggatttcccaaagccttattttcgttaatacgtccttttcttgacgctaatacacaacgttggaaaaatggttgtaaaggtggtgctcccaaagggaataaaaacaaccgcttttcaaaaagtacaaccgaagtacaaccggaagttaaccagagtacaaccgaagtacaagctaataaggataagaatgtaaataaggataagaataaggatattaataaagaaagtactatcgtatcaaagaaagacgagctttctttatcatctccatccgaagaatttataaaattcaatcaatggctagataaacattgtcctttcgtactgaaggtaaaaacgcaaatgacagaaccggaatatcaaaagcttcttgccaaatacaccaagaaagaaatttgcgatgtccttgaaagcttgaacaactggaaagactttcccaagaaacggactaatgtatatcgtagcacattagacgaattgaagaagaaattcggagaacgataattttaaactgttacaactatggcaaagacagagaaaatcttgatagacaatatatgcccgctgcatgatttggaatgtgagaaggcagtgttaggcacattaaccagtcctgtattatccaatggggagataccggagaatctgacggaagattgtttctatgacgaatttaaccgcaacatattccgggctattcttacaattatatcccgtggagatcatcccgaaccaatcgcaataaaagggtgtcttgataaaatgggaatatctttcaatgtggccgaattattaaaacacctggatggcatgacgcttgatttcaatcaatacgtaaaccgcttgtttgatttgagtgtacatcgcaaattcagggagataggtttgtttcttctgaaacattccgcctcggaagaggaagatattgaacaggtgcaaacaaaagccgtcgaatccctatctggtatgttccggcaatcttcggacaacatatacacgctaaaggatggtttgacaggagtacaccaacaagtgaaccgcaatctttccggtcagacatcattaaccggaacgcctaccggattcgatcagtttgatagaagatcaggaggattgcaaaaatccgatttgataatcattgcggcagagcaaagcatgggtaaaacatccctgttaatgtctattttgcggtttgcggcactttcaggtacaaagagcataatctattcaatggaaatgagaaaagagcaaattgcgtcccgtttggcttctattgaaagcggagtaccggcaaatcaaatcatgtactctcaattaacaagctcccagttagaaagctttgataaagggttggctagattgcttcatcttccgatatatttcgacgataacagtaccagcaatatagacagtataataaactctatccggtacatgaaacggaagtatgatatagacggtgcggctgttgactatttgcagattctcaatgtaaacatgaagggagccaataaggagcaacagatgggcgacgtggcacgacgcttgaaaaatctagcaaaagagcttgatatctggattatcgcattatcgcaactcaacagagacaaagataacccggttccctctatagcccggttgagagatagcggacaaatagcagaagccgcagatatggttatgttgatttatcgtccggaagtgaaaggcaaatcatacccaggagagttttcccatgtagacaccaaaagtacggcaatgatagatgttgccaaaggccgaaacatcgggataatgaagttcatttgcaagttcgatgctccgaccactcacttttacgacttacaggatatacctatttcggcaaatgttgaacctgatcccttctagctatggaaatagaaacaatctacgggcaagtgatagcgaaagcaaacaactatcaagccgtaccgggcaaagacggccagaaacggatcatcaaaaacgaccggatcagggagtatgagaaatccttctgcctacaatgcaagaagtatcgagggaaacgcatttccggtcgtttcaagctatttattcgtgtttggcatgggaatattcgcttcgacctggataatgctctaaaaacgatccttgattgcttgcaaatggttgaggctattacaaacgacagcctatgttttgagattcatgcggagaaacggatagaccgacggaatccgagagtagagtttggtatggaagagataaacgagcaaaaaaatatattcagcccaaataagacgaaccataccatttttacctgctagataagcaagagtataaaaaagaatagattattattttcgttcacctaaaaatgagcgagagcaacatttaaaagttatggaagcaattaaagaattaggaaaagagttcattaagaacaaagagcgatttatccaaatcggatataatccccaaactgaagtttacttatacaaacgtatattcccaggaggagcaatcatttatgaagtgtttaaacgcaagataaataaacggtttaactgtgttagctatcccggtaacaatgcctttggttattgggctttgacattccccaaatatgagcaagcgagatattatttagataatgggtttataaaaccttcgtaggctaattttaaaaagaaccattcaagtaaacgcccatcaagcgaggaaaagtattaccggataggtgtttgtctaatcgttgcaaaagaattagagaacaaatattttattaaccaatttaattttttaagtcatgaaacaagaaacatttttcggagtaagaaaagatagtgaaaaacatctttatgtgagaagaggtgataacaacgaggtccttatcactaaaacagtaaacggggaatccataacagaagagaacaccgtacacctaaatgcggaagaagcccgtaaactagggattcagttgctaaaattaggtagtgaagaactgccaaaatctggaatagaccttaaaaccgaatctttcgtggacaaaatcacggtatacagaggaataaacccggacgaaacaccggccaacctcgcagttatcaccattgatgaaagcgacgaggccagacaaataagggaagatagcggagaggaacccggcttttccattgaaggggaagaactggaaaaactcatttccgcactggcaaagattgtataaccgataccgggtaggtctgcttcggatggtctacccggtataaataaaaaatatgctatgacaagagatgaattatatatcaataacacaaaagccgatcttaataagacggatattactttgagctataaaagtaacctgctaaccgatattagtaaaattgtaagtaatagcagttatacaatcaggttgcctaaaacagcaaataatctggctttgattgagtgcgcacatcttcccagttcaataagccgttatccgtacctaaagcataaaggtacgttattacggaatggcattgagataatcaaagatgcaattgtagtattgctagagattaatgaatcaatagaaatagctcttacctggggtaatgtcactaacttcgccagtgtagtaaacgatggcaagaagctaacggatttggaatatggaacagttgagggtacagattgggttgtttgggaaaattggggagaaaattcggaaagatttccacgtattgactacgggtttaactctaatgatccaaacgtttggcgtcatccagtagtacctgtatggtggatactttataggattcaagaagaaagcggagtgacatttaatttcccgtctgacaagcttactgttataaacaaaatgattattcctcttttgacaaggaatgattcacaacccctttttgataagttcccatttattataaaggcttcaggtcttagatatgacggatttaattcttgcgatgttgttttttcaatcccagatgctacacaacagaattatggagagattctttcagaaaacactttcttgaaatcaaattatgaagcttcactaataagtggagaaatatatattggaataaaatatacatatagtacatcttcatccgattatcctataatacttaacgtatatgaagatagcgcaaatacatctcctgtaataagtaaaactatatatcctcaaatagaacaaaaagacggatataaatctctttattttcaatttagttatgaagtagatataaaagatgggtataaatttgatttaagtcttactccaagaccatccatagatcaaaattcttgttttattgaatctgatagtaatataaatctgtatctaaagactaagggtgaaatatcttttggtgagaaatttcctctagttcccaatcttccggacatcaagcaaatagacttcattaaagccgttgcctcaatggtcggtttgtttgccttaccggacggcgaaaacgggatcaagtttattcccttcgataatctgtctgcaaacaaatctaaagctgtagactggacgaatcgtgtgataatggcttataatagcgtaacgccaagaaacttacagtacacccttgataacattgctcaaaacaactggttccggtataaagaagatgataatgtcatgggaaactatgacggaaatatccaggttgatgatgccacgattgagtacgaacgtgatgccattactttgcctttctccgcctgcagtacaaaaggaggcgttgcttatattcctttgtattcctacaacgataacggagaactacagtataataaagccaatccccgaatattacttcttgatggcacaaagggaatattcaagggactagaatggactaccttaattgcaaataactatcagacgtacaaaggactaatcaataatgcaaagatagtgaccgagtatatccgtcttaacagtatcgagttacgggacttagagatggatataccggtttatttggctcaatatggttgttatctggctatcatagagataaagaccaaagagaacgatatatgcgagtgtaaacttttaaaattgtaatgacatggaagaaaatgtagaagaaaagattcggagtattaccgaacaggccaatcaaactagaaaaatgcttttagaagagtatttgggacattctatctctatggaggaggctataaatatggaaataccggacgaagctctggatcatctgggagatttgtaatttaatgattaaatataaaagactactgaagatatggcaaaatttaatgaagaaacaattcaaaagtgcgttgactgggtatgtgaaaacggacttatagattatggcggtgcaaagcttattgacttctgtaatgtaatgggaatcggaaagagtacctattaccgatggatggaaaatgaaactttcgggaatgctataaaaaaggcgaaagaagatttcaaaaacgggttggaacgcaatgtcgtttcctccctcgcaaggtctgccatcgggtatgaatacgaacaggtttcttctgaatactacatggaaggcaagaaaaagaagttgaaaaaggaagtaagaaaaaatgtccgtgttgaacctaatgtgggagccggaatattccttctcacaaaccttgctcctgacagatggaagaacaaacagaacaccgagcattccggagaagtttctaccggattgaccgttgtagtcaagaatcaggaagaagcggatttaatcaaacaattaaaagaacattagttatgtctgcacctaaaggaaaccaattttggaagttgagaaacaagcatgggagaagcaagcgttttgcttctcctgaacagttgtgggaagcagcctgtgagtattttgcctattgtgacaggactccatggaaagcaatcaagaataaaacgaaaggagaaataaaggaaaaagaagaaagccctacacaacgtccttactctctgaccgggttaatggcttatttagatgttagtaagtccttttggaacgattttaaaaaaggtagtcatgaagatttttccgtagtcattacacgcatagagaatgtcatcaggacacaacaattagaaggtgctattgttggtgcgtttaatcccaatatagtttcccgaattataggtctttctgataaacaaaaggtaactcataccatcaacagtaaagagtttaaaggctttgatttcttaccttatattcccaaagcagatgaaagtatatgaggttttagcatcaagccgctttctactcgctacaatgaacagaaacggagtgagcgcagatgatataatgtatcttgatatgttctatgagtatagagatatgcttgcagaaggacgaaaagaagccgaaattcgggactttctttcaaacaagtataagttatcagcctcaacaataaaaaaggctataaagcgtttgaatgaagaatataaattatagttttaatggttaagtataaacaaaagccccgaaccaatcaaggaacggggtatgtttaatacatatttacaactattttgtcgggaatcaaagctgattttcccgttgcaaaacaagttctttcacttctggatataaatccaataattttttatccattttatctatgaactcatatacttccagaaaataaatcaaagcatttttctttgcaaattgctcttgagccaataaatataaaaatggaactttggagacatctacaatttcttcttttatttttgttggttcattcaagctaccagagtatataacagtagaagattctttaaatagttttgaataagaagcatgagaaaaggtatttcggtatatattttttagctttatcaatctttcagcttcatctttggttatcaaacctttacttttacacttcttaatattaggttcaatatccctattatcatagtcctcaacttcttgtttgaatgtttcatctatcctctcagaatcattaaatcgtctaccctgtgaatcccatgttatcaatgtttgtttcaaactattctcaaataggtgatttgttagagttatagcagcttgtgcattaccaattatcagacaatcacatatttctgatattatagatttgagtccatttaatacattcagtttaccatatttgataaatatgaggggtcttgtataatcattgactacaatcctatttcttagttcttccaaatattcagttgcttttgcatctgaaaatcctttgactgaatacttaagattgatattcttattcatatttgatttgcttttacattgacgtcctttccacaataaagaacaaaatggattactaacctcttcattattctggttcgtaaccctcataataataagattgcgtaatacctttaaatataacttctcgatcatctacctggttggttaatccttgatgtaacaaagttcgcagttccaggtcgttaatcgggcttctttccatagcttgcaaatagagaaccttatccacattctgccaatcaatcaccatgccaagacgttttttaagtatcatatcgagccaaatgcgcatagtacgaccgttgccttccataaacgggtgggcaatattcatttccacatatttagcaatgatttcctcaaatttcgtttccggcatcttttctattactgggagcatcacatcaagatacatacaattagcaaaacgaaagtttccctttactatattcaacgtacgcacctgtccagcaaacctgtacaacccatcgaacaaataacggtgtatgtcacacaatccttttacggttcccacctcaatacgatctatatctccagtttcaaacaaggcatgagcttttgcaaagctcaatttatctatttcatttgtattcataccctattgcattatagacaaatatctttgtaaagaggctatttcggcctcaacaacaagtttttgaaaggcttccggcttattctctgtatgagattcttccagtgctttataataacttattttatcctcattgctaccttttaaagtaaccaatgtatacccattccgtaaaagataaagattcatcaataaacgtgacgttcgcccgtttccatcaataaacggatgaatacgtacaagttcgtcgtgaagatatgcggctataagtaccggatgtactttttcttcctccatctgctggtactttatcacaaaatcctccatttgcttctgtattaaataaggttgtggcggcatgtgggtactaccggaaatcataacgggaacggtacgatatttcccggcattttcacggtctattccatgcaagataagagcgtgtatttctttgatagtacgttcgcttatctctatatccttcttcgctatatctttgatataatcaatagcctcgctatgattgatagcctccagatgttcacgcatagatttgccggatatggtaactccttcatttactactagggcagtttcctgtaatgtaagggtattgccttcgatccggttactttcgtaagtatattctatatccagggcatcctgtatcttttgcagcgcatcttccggtaatggacgtaaagcggataactctcctttgagtgtatcggctttatctaacaacagttttaaatcttcattcatgactattctactttgatattataaaacaatttctccgctttctattctatccagcaaccgggacaagtccggcacactatttatattgtaattgatatctcttatgcggattactccaataataccaccggaagaagaaggtacaaacagttctgtaatgtcaacctctaaagcattggcaatcctttccagtgtttcgagagaaggtgtagatttaccattaacaatattactcatatttggctgggttatccctatcattcctgcaagtgatacaacggtcacttttttttcctttaatacatctttaattcttagttccatattatatcgttttagattatagtacaaacatactacattatatcgaacaaaagtataaacaaaggttaaacatattcttatacatgatatttttgtgctatttattttggtattatattttaatacgatatatttgcatcgcaataataatgcaaaacgatataaatatatggcacgttacgatttaagcaagataatgaagagagcgcacaacctttataaaaacgctcatgtaaagtacccgacatttgccgatgcactccgtaaatcttggaacatggcaaagtttgaggttagagtagccgaagaacgccatgcaatcgaagcggagactaaagcacgtgaagcaaaggtacgtgaagagaacgagcaagccgccattagttcggttcttcttcgtgcacaaatcgaagccgaccgtatcagaagagaagcggaagctaaagcagaacgcatgaaaggcgagatagcagcacgcaaagagggcatctcttataatgagtaccaaaaccgtattagccgtacaatgggctacgggtgtggttcttattgtggtgattgattattaacccgatggggtggtttcaccccaaccccatcataaaacatatacaatgacagaaacaaaggtttacaagctccatgagagcaagcaagtagaggatattaccaccatgctaaagatagagggattaaagcataatgtattcgaatacgaagagtacacagcaatagaagtgactggcacaccattagagataataagagcctccacgatataccaacaggttacaaccattaagctataacgagatggagatattgatagtatttggatgcctatacactggctataggatatttaggagaaagagagaacacttctttgatatttaatcaattatgaacgctacactaattatttgtatcatccttcttgctttctgcgtatgggatgaaatgtttaacgataacaacagaaatcaatcaatataaatataactttaataacaatggaaacatttgatttacaagatttaatcacagagaaaaatgtagaattacaagagttcatcaaagagcaaatgagagtacaccagcttagtaatttatcaatagaccaaagagagttaatgatagatactccagcaataagtacaaagcaaatgattgatgcttattattccacgatccagcatgtggcagctcggctgattgaattagaaggcaataatgaggcatggaataaacatcgagccattatcatgaagaaggtagcaaagaaagaaaaggaatgtaagagaatagagaagaaagcccgaaaacatgaaagatatagccagaaactcacacgagagtacaatataaaatataacgctaatatacaactttagatactatgtacacgcaattagaaaacgaaatacgaaagacaatagcccttgaagttaaaggtgatagcatgaataatggaacacgatccagttttgaagctggagatagattaatagtgaagccctttagcattgacgattttagaaacaatataagtaatgatctaaatagcttttgggtaattgagatagagcaaggctacctgtttaggcaaataattgagtatgataatacccgtgatgcaataagatgccactctttaaacgtttccggacaatatccagatgcttttgtagaaattaaaaatattactaaggtcggaagagtgattgaatcacaacgtaatacgttacaacgaataaaatagcatataataagaaataagtttgtgctaggggccacggtccgacacattgaaagttgacgccatcaacaaagccaccccggtaacaatacggttgccgggctttctttttatgatcgctatttatatatgaatgagataaacgccacaaataaaaatattaaaatgtcgtaataactccaattatttttgttcatttgtcaacttaacaaaaagaaaaagacatggaaatagatccgattattaagcaagccattgagattggcattaaattaggtattgaagcatacaggaatgaaaggaatgcaaacctcaaaaacaaaaaaattcttatatgcaagtctgatgcagaaagacgttttggacgtggagtcattagagagttgattaaaaggaaatttatattcccttatcaatttggtattgaaacaatggtagacgaagaaggtgacgaaattaccgagcctagaggacatatatactataaactacatgaaattatagaagctgttgaggaagggaatattctaaaatgccttcaaaaacgcagaactatgaaatataactccaaataaccgttatttggaactgatacactacaaagatttttccccagtcattacgcacgtatgaaagaaattctcaaaaatgtggattttgtggatgctataaaaaagggaaataaaataaacatgaagatttcttcccggtcatcacacgcatatatgaaagacttatcaagcccttactcacgaatatcaaaactttttagtaacttcgtatctatgaaactaaaaccaaaatagcatttagagtacatgaagcatatattcaacgaggaacagcagaataaagcagcatttatttgttcaaatcccatagctcggctatccgaactttatcgtagtgaggttgagaatcttgctattatatggtgttactattccgggaagatagaaggcaatagttacacttatgttgaaacagaaactctcttaaaagaccaaatcacctctctaaagaaatatgaagatgcagaaatactaatcaccctacacaacacattcactacagaactggaatatatcaaagagagaaatagcaaagaaatagataaaagcactttattcagagtgtatcaatccatatctgccggtttagttcctgatgaagaatcagagcatttaagaaatagacctgtttgcgttagtggcatagagtacacgccaacaaaggaattacataggatctcggaaaaactggacgaaatactccatcaacaggaacaatatactaatccattggaacgagccgtttatcttcattgcaacatagcccaattacaacctttcgctaataagaacaagcatgcttcccgaatgatagaaagtattgtattaatgaatgctgatattatccccgtttattctttaagggagactgatatattgaactacaagaaaggggtattatttttttgcgaaactggagaatattccctatatgctgactacttcctgaatagacaaatcgaaagaataaaagaaatcgaggaataaaaaacagtctttcctcaaaacaccatcctgatatcatgttttgtagtaccaatgtagtaccattttcaattaagagcaaagaaaaacccttccagaaaacatctgaaagggcttcgtgaggttcctggcggattcgaaccgccgtacacggttttgcagaccgctgactaagccactcatccaaggaaccattatttctcgtttgcggttgcaaaggtagtacaaattttgaaactaccaactatccgcagcaatttttctttgtactttttttctttacatcgcattctccgcgtttcttgtctatcatatcctttagttcacagccacttacacagctatcacaaggattctgattttctcgcgtacgacgaaaaaaacgaaatattccatatatgacgcgggcaatgcagagtacaaccagtactccgactacccaatcttgccaattattcatacaaacaatcctccaatctgataaacagcaaatgatacaagccaagccaatcccgttgtgtaacaagcagcaaaaagcgcccatttccaactacccgattcctgttttatagccgctatcgccgcaatacacgggaagtaaatcaatacaaacaacatataacagaaagcaaccaatggagtaatcggaattcgttctgccaaacttactgaatcagcatccggatcatctgcatataagacacctaatgtacttactaccaattctttcgctcccacaccggaaagcaagccaatacctagtttccaatcaaatcccagtggttttataactggctctataccacgtcccaactggccgatataagaattttcctgctgctcggcaactgtttcataagcatcatgattcggataataccccaagaaccagattataatagaagcaatcataataatgcctcccatctttttcaaatactgcgctcccttttcccatgtgtgacggaagatcgattttgctgtcggcatccggtaaggtggaagttccatcacaaatggagtatcatcacccttcaccagaaacttgctaaacaagcgggccattaccacagccagtacaataccaatcacataaatacttaacaacaccagacttgcattgttcgggaagaaagcacccaccaacaataaataaattggcagacgcgcactgcaagacatcaaaggatttaccaacattgtaataagacggctcttccggttctcaatagtacgggaagctataatagcaggtacattgcatccaaatcccataatcaaaggaatgaatgattttccgtgcaatcccattttatgcatgattttatccatgataaaagctgcacgagccatataacccgaatcttccataagagaaatgcagaaatacaaaatcaagatattcggcaaaaagacaataaccgctcctaccccaccaataattccatcaatcagcaaatctttaaatggaccttccgccatattattgcgtaacaagtcaccaatctgctcgacaagccattcaatccccatcatcggatattctccaatgacaaacgtaccttcaaacatcagatacataaaaaggaagaaaataggaaatccccagacacggtgagttacgatcgaatccagcacttttgttgtctgcgcctgctccaagtgattatctgtgaatgtctccttcagtgcaccactgataaatccatatttagcatccgtaatagccgattcacaatcctcattcattgtgtcctgaacacgcttcgacatcttatcacggacatggaatatctcatccgcatttggtaatgtccgcacaatgcgctcaatgtcaggatcattctccaacaatttaatggataggaaacgggtagaatatttatgacggataaattcgtttttggacacttcactttttacagcttcaatcgctttttcgatatcaggaccatgattgatatgaatatgccggaagacacgccccgtctttttatgttcacgtacataatcttccaaatgctcttcctcgtggttcttacgatcttccagagaatcatgccattcggtcaaatccttaagaacttccggattcatatttccctgtttatcaaagaagtctactccttcatacagattgataacaacatgaaacaaggtatccaatccacgatttttcttactgacagtaggcaacatcggcaccccgaacaacttactcaacagatgataatccaatgtatttccactggcttccaactcatcataaatattcagagctaccaccatgcggacattcatatctatcaattgagtagtcagatataagtttcgctccagattagaggaatcgactacattaataatcacgtccggagtttcatcgataatatgacgacgcacatagatttcttccggcgtataagcagacaaagaataagttcccggcaaatcgacaatacggaaatgatagccttcgaaatcaaaataaccttctttggcatccacggttacgccgctgtagtttccaacatgctcatgagcaccggatgcaagattaaataaagaagtcttgccactgttcgggtttccgaccaaagcaacattaatggtacggcgtttacctaacgccaaccgtttcatatcttcttcttttactgaaaggtcttcaggcaatccttcatgataaacggtcttctcggccagtttctttgcttcctcttcgctgataacttcgatcatttcagcctcctgacgacgaagagaaatttcataacctaaaactttatattttatgggatcttttagcggagcattcaacagcacttcaaccgttttacctttaatgaagcccatctccacaatacgtttacgaaaaccaccgtgccccaatacctttacaataacacctttttctcctgtttttaattcggacaaacgcataactctcaaaattttcggcaaagataattcataacttcggagcatgcaaattatttagaatgtttttaaatagcagcttttttcatcctctaaaagattcagaaaaaataaaaaaacttattgataaactcgtatctttgcaggtatgatacaacaacgcgttacaaaatatatagaaaaagaacatttgttctcaccggatgataaaatcctgatcgcattgagtggtggcgccgactcggtggcattactatatattctgcatacagcaggctatcattgcgaagccgcacattgtaatttccacctgcgaggcaaagaatcagaccgggacgagctatttgtccgccaactttgcgaaagaatggaaatccatttacataccattgatttcaacacgacccaatatgcaacggaaaaacatatttcgattgaaatggccgcacgggaactccgctaccaatggttcgagaaaattagaaaaaaatgtcaggcagatgttgtcgctgtggcccatcaccaggatgatagcatagaaactatactacttaacctgattcggggaacaggaattaccggtctgttaggaatccgcccccgtaatggagccatcgtacgccctctgctttgtatcaaccgggaagaaataattcgttacctgcaaaacatcggacaagattatgtgacagacagcaccaatctggaagacgaatatacccgtaataaaatccggctcaacttccttcccctcatgcaggaaattaatccgtcagtcaaaaacactctggtagatacgagtaattatctaaatgatgtagccactatatataataaatgtatagaggaaactaaaaagaaaatcattacggcagaaggtatcagaatctgtgatttggtaaaggaaccggcacccgaagccatcttattcgaagtcctgcatcctctaggattcaattccgcacaaatcaaagatatcgctcactcgcttcatagccaaccgggcaagcaattctgtagcaaagaatggagagtgataaaagacagagaatttctattaatagaaactgcggaatctaaaaatgagactcttcctccttttcaaatcatcaaagaggaaagagaatacaccccggattttctcattccacgtgaaaaggaaatagcctgttttgatgccgacaaactgaatggagaaattcattaccgaaaatggcagccgggagacacttttattccttttggaatgaaaggaaagaaaaaaataagcgattatctgaccgaccgcaaattttctatcagccaaaaagaacgccaatgggtactctgctgtggagaacatatcgcatggctgataggcgaacgaacagacaaccgctttcgtattgataaaacgactaagcgtatcgtgatttacaaaatagtttgaggcaacttctgtttcttgaagcaatctgataacaaagctgcaaaaggggtatcgtatacccttgcttttcttacgcaagcttttacacaggcgcaacatttgatacatttagcctcatccgtatgtagctcgtcccctttcgttatagcccctgccggacaacggaccacacataatccgcaatgggtacacaaatcctcatcttccacccaaggagcgcggggaagcggtgtcccacttttacgtaacttgatgactttcctcaaaaaacggaacaaaggaaagaatggctgactcggacgtttgatagcacgtacatccaccggataaagggtatccatactatcagctgtctgtattttttccatgattttcttcccaaactccccagcaaaagctaaatccgattcatctggacgtcccactgcaatcgggtatttatcggtactatatgaatgttctccaataaaagttgccccggcaattactttaaatccgtgaggaatagcaaaagcatccagttccattaaagctttttcataagcgcgatttccgtaaaccactaccaaaacggtaggagtatccactccacggatatactgcaaacgttccattgccaaaggagcgacatgtcctccatacacaggcactacaataatagccaaagaagatgtaggaatcacaatttcatccgcaatctgctgcgttacattaataggaaaaatattttttatgcccgtcccgtgaacaatcgcctccgcaacttgtttagatgtgtgtgtaggcgaaaaataaattaaatgagcttcatttactgtcatactattttcttttatgtagcaaagatacacttttacgtggaaaaaaatgtttgattgttcatgaaaccaaaaaaaattattatctttgccccgttgaaacattctacgattcaacatatacatccctaattcagaataaaaaacaaaacgtatgctcgcatatctgtagccatgagctgtagtaatgctgtccataattcagcaaaaaaaagaaatattaataacttaccatactatatgtataacattatccaattaaacgacaaaaatctgtcggaacttcaagttattgccaaagagttaggcataaaaaaagcagactcatacaaaaaagaagaccttgtttataaaatactcgatgaacaggccattgtaggagctacaaagaaagttgccgcagataagctaaaagaagaacgcaaaaatgaagaacaaaagaaaaagcgttcacgggtagctcctaccaaaaaagaagacaaagtggtttccgcaacaaagagtgaagaggctaacaagacaaaagagaccgctcctgtaaaagctgcaccacaaccttccaagaaagaagaaagtacaaacaaagaaaaagaaactgttgttgtagaagctaaagcggaaaacactgctactcccaagcgtaaagtaggccgtcctcgtaagagctctgatgcagaagagaaaaaagaagtagaaaatgcaaaaccggcagcacccaaagtagtggaacctaaacctgttgttgcagagaaagctactggtgctacggaaaagccagctccggtacaacagcaaacagctgagaagaaagcaaaaaacaaacctgctgcagaagcaaataaacctgttgcagaaacaaataaaccggctactgaacctaacaaacctgttgtagagaaaaaggtaatagataaaccacaaaagaaagctgcacccgttatcgacgaggaaagtaatatcttatccagcgttgacgacgatgattttattccaatcgaagatctgccttctgaaaaaatagagcttcctaccgaattattcggaaaattcgaagctactaaaacagaatcagcacagacagcaccggaacagccatctcatcctcaacagcaacaacaatctcaacagcagcagtcccagcagcaacgtccgcgtattgttcgctcacgcgacaataacaacggtaataacaatgctaacaacaatggaaataatggcaataacgccaataataatttccagcgtaacaacaataaccagaatcaggttcagaacccaaatcagaatcagaaccagaaccaaaaccaacaacgctcaccgatgccacgtgccgctcagcagaacaatgcgggtgaaaatcttccggtacaacagcagcaggaacgtaaggttattgaacgcgaaaagccttatgaattcgacgatattctcaacggagtaggtgttctggaaattatgcaggatggatacggattcctccgttcttccgactataactacctttcttctccggatgatatttacgtatcacaatctcaaatcaaactatttggtctgaaaaccggtgatgtagtagaaggagttatccgtccacccaaagaaggagaaaaatatttcccattggtaaaggtttcgaagatcaacggacgtgatgcagctttcgttcgcgaccgtgttcctttcgaacatctgacacctctcttcccggatgaaaagtttaaactttgcaaaggcggttattcagactctatgtctgcccgtgtcgtcgatcttttcgctcctatcggtaaaggccagcgtgcattgatcgttgcccagccaaagacaggtaagaccatcttaatgaaagatatcgcaaacgctatcgcagccaaccacccggaagtttacatgattatgctgctgattgacgaacgcccggaagaagtaacagacatggcgcgcagcgttaatgcagaagtaattgcttctactttcgacgaaccggcagaacgccacgtaaaaattgcaggtatcgtattggaaaaggcaaaacgtctggtagaatgtggtcacgacgtagttatcttccttgattctattactcgtctggctcgtgcatacaatacagtatctcctgcatccggtaaagttctttccggtggtgtggatgcaaatgcacttcataaacctaaacgcttcttcggtgctgcccgtaatattgaaaacggtggttcactgactattattgctaccgcattgatcgataccggttctaaaatggacgaagttatcttcgaagaattcaagggtacaggtaacatggagttgcagctcgaccgcaacctgtccaacaaacgcatcttcccggcagtcaacattaccgcatccagcactcgtcgcgacgacctgttgcttgataaaacaacccttgaccgcatgtggatattgcgcaaatatcttgccgacatgaatccgatcgaagcaatggactttgttaaagaccgtctggaaaaaaccagagacaacgacgaattcctgatgagcatgaacagctaatcaacagcaaacttataaatgaacggtgaacaaactgcgccataacaagtgcagtttattcaccgttttctttttcggtaacccattttatgacttatcacctgccgtttatcacttatcattcaactcccatcaccgatagttacccctaaccgcttgccacacctttcatttttgtacaaaatactttcatttgcgtccaaaactactacctcgcccttttttacgtttccttttttcctacttttgcttccaaatcaaatattacttaattctaaccagtaatgaaaactatttatccattcatgggattagccctgtgcagcgtgacagcgcaggcccaagaaaagcccaatttcctgattatccagtgcgaccatctgacacaacgcgttgtgggagcttacggacaaacacaaggctgcaccctccctattgacgaagtcgcttcacgaggagttatcttctccaatgcttatgtaggctgccctctcagccaaccctcacgcgctgctttatggagtggcatgatgcctcatcaaaccaatgtacgttccaactccagcgaacctatcaacccacgtattcccgaaaatgtaccgacattaggaagtcttttttctgaaaacggttacgaagccgtacacttcggaaaaacgcatgacatgggttcacttagaggattcaagcataaagaaccagtagccaagccattcactgatccggaattcccggtcaataacgacagcttcctggatgtaggaacatgcgaagacgctgttgcttatctaagtaatccgccggaagaaccattcatctgtatcgcagattttcagaaccctcacaatatctgtggatttgtaggagcgaacgaaggagtacataccgaccgccccattagcggaacccttccggaactaccagccaatttcaatgtagaagactggagcaatatccctaaacctgtacaatacatctgctgcagtcatcgccgcatgacccaggcctctcattggaatgaagagaattaccgtcattacattgctgctttccaacactataccaagatggtttccaagcaagtagacagcgtattgaaagcactttactccactcctgccggaaaaaacacaatcgttattatcatggctgaccatggtgatgggatggcttcacaccgcatggtgaccaaacacatcagcttctacgatgaaatgaccaacgtaccgtttatctttgcaggtcccggcatcaaacaacagaaaaagcccatagaccaagtattgacacagcctacactggatcttctgcctaccctttgtgatttggcaggaattcctgttccggccgaaaaaccgggaatcagccttgcacctatattaaaaggagagaaacagaaaaaaactcacccttatgtcgtttccgaatggcatagcgaatatgaatatgtcgttactcccggacgtatggtacgcggaccgagatacaagtacactcactatctggaaggtaacggagaagagctatatgatatgaaaaaggatccgggagaacgcaagaatctcgccaaagaccctaaatacagtaaagtcctcgccgaacaccgtgccatgcttgatgattacatcgcccgcaccaaagacgattaccggagtttgaaagtagatgccgatccacgatgcagaaaccatactcccggctaccccaaccacgagggccctggggtacgagagatactcaaaagaaaataaattataaaaaagagtgaagatttctttgtaatcttcactctttttagttcttttgcagataaacttacaagcaagcaattcttatatcaggtgaaaaaacacagacgtcatataattgcaatagtcgtaaccgcattaatatcggtcaccttatatgctgcacgtacaaattcagatcgtctttctttattacaacctttacttgaatacaatcatccatttagtccggacgcccctgtcgacagcatcattgcctgggaaaaacttttagaaccggaattacaaaaggaacaacaatacccactcctattccagataaatctgctgaccgttcaagccttaatcacagaaggcaacatcagtctcgccatcaaccaggccaatcagatgtaccagaaagccagagaaatggactatcctttgggaacagcactcgcattacacgccattggaaatacctatttaagttcgtcaacaccacaagttgccatcaaatcgtataaggaagcattagaaatcattcagaaactccctcatgccaaccaatatatcaaaacgatcttgtcccaatttatcctgacgaagctcaactatcaccaaatgacagatatagaagacaatatccgggaactcgaatctgttatcaacaaggatacgaatccccaagacgatttccaccttgtttattgtcaggcattctatcgcatccagatgcatcatcttccggaagcattaaactatatacgacaaaccgaacaaatcagccggcaacaccagtacccatattttcatttaatgattaaatacctgtattcacgctactacactgaatccaaagaatacacgcaggcactaaccacacttgacgaattactttcgcataccaaagcagccaactcatacagatccctgcaagtactgaaagatcgtgcacacatacttacactaatgggaaacagcaaggaagcatgtgaagcttatgaaatattcaatacgtacaaagactctttggacgcaatgaattatattcgccaaatcaatgaattgcacaccctctaccaaatagataaaaatgaactggacaacttaaacagacagaagacaatcctctactggagctggttcaccatcctattcatagtcatactgattgtatttttcatccttttggtcagacgaggaaataaaaaactgcgccaatcacagcaggaactggaaaaagtgaaaaagcaagaagaaaattccatccggacaaagagccttttcctttccaacatgagccatgaaattcgcacgccgctcaatgcgttgtccggcttctcctccatcctgacggaagaatccatcgacaacgagacccggaaacagtgtagcgatattattcagcaaaattcagaactgttactcaagctgattaacgacgtaatcgacttgtccagtctcgaagtaggcaagatgaaattcaaatatgagcgatgtgatgcagtggcaatatgcagaaacgttatcgacatggttgagaaaataaaacaaacgaatgctaacgtccgtttttcgacctctctccattcattagaattgacgacagacaatgcaaggttacaacaattattaatcaaccttctcatcaatgcaaccaaatttactccgcaaggttccatcaccatggaactggaaaaacagacagaagacatagcactgttttccgtgaccgacaccggttgcggtatctctccggagaatcagaataaaatattcaaccgttttgagaaactgaatgaaaatgctcaagggacaggactcggtctgtctatctgccaactcattatcgagcagctgggcggcaaaatatggattgactccaattatgaggaaggagcccgtttcctgttcacacaccccatttaccatgagcaacaaggaaaggaggaagccgaatgaaacaagtcctgctcctgatccttctattatgctgcaccctcaccggaaaagccagcaccgagattgttttggaatccgacagcctgataaaggtgttggaaacattaccgtacgatacgacacggctgaatgttctcaatcaaatcatcagaatagaacaaaacaaccagcaatgtatccaatattcggatgtattaatgaaagaagcattgcaactgggaaatgacaaatatgccggtctggctgcttactaccatattttatactattacaatcgtaataatcaagacagtgtagccaaatggctcaccataatggagcctcatgcccggaaatcagatttatggaattacttctttgatgccaaacgtttccagatagacctgtacacattcaacgaacaatacgaacttgctatcaacgaatctcaaaagatgcaacagcaagcctcccaaatgaatagtaaccggggtagtatggctgcctatcaatgcttgagtaatgcatatatcggcagccagcgctgggataaaggaatagaagcactggaggctgcctaccagctactcactccgacagaaaatccggtggtccgtatctcggtattgtcacagttagtatccgttgtcaaagaaaagaaggataataaaaaactactcaaatatttgcaggaactggaaaacactcttcataaccacatcagtgcaaacccatccttaaaagcgggatttgccgatgtatacctgttcaatgaactgttctacagctattattacctgaatacccatcagccgcaacaagcctatgaacatctcgtaaaatctaaagaatatctggacgagaatacttatttcatgtataaagtactctatttcgacacatttgccaaatattaccaggcaattggagcctaccaacaggcatcggattatatcgacacgacactgacgatgttgaagaaagacttcacaagcgactatgccgaacagctactcgaaaaggccagaatatggaaacaggcagggcaaagcggaaaagccatccccctgtatgagcaggcacttgccatcaaagactcgacagccactgtactctcaaacaatcagatggcacagatacaaagcaaatacaatatcgaaaaaacagaactggatcaaaaaagggaaaacaaccggatccagctcacctatctgatctttatatttgttatcctgattctgctttttatctttatggcacgactctttatggtacggaaggcactcaaatacgcggaaaacgaaatccggaaaacaacagaaaacgtgcggaagaccaatgaaataaaaaatcgcttcctgtccaacatgagctataacatccgtaccccactcaacaatgtggtcggtttctcacaactcatagccagcgaacccaatatagacaaggaaataaggcaagaatactcaaacatcatccacaaaagttcggagaagttaatgagacttgtcaatgacgttctcgacttatcccgtttggaagctcagatgatgaagttccagttgcaagactatgatgccactaccctatgcaaggaagcatgcagcatggcgcagatgaggaacgaagaaacaggtatccagattgaattttccagcgaaacggacgcccaaattcataccgatataatgcgactgacacaggccttgattagcgtactggtgtacccacaagaacaccggcaagcacgaatcatccggttcacattaagccagaatgaagacatgctttgtttccggatcactaattcacctttggcagaccatgcattcgtatcacaggaaaccatcatccggcatgatatcaacctgttgttactaaaacatttcggaggaaactatctcgtcaacgataaaactcccggaggtccggaaattgttttcatctaccccatcgtttccgaatcgaaataaagcactatctttgcaaagtgtaaacttaaacacttaattatgtacaccaacaaacagatttggagtgtcagttatccgatactactaagcttgctggcacaaaatgtcatcaatgtcaccgacacagcattcctcggacacgtgagtgaagtagcccttggagcatcagctatgggcgggttattctatatatgcgtattcaccatcgcattcggattcagtaccggttcgcagatagtcatcgcacgacgcaatggcgaaggacgctattcggatgtcggtcccgtcatgattcaaggaatcatgttcctgttcgtcatggccctgctgctattcggattcaccaaagcattcggtggaaacatcatgcgtttgctggtttcttcagaatccatctacgaaggaacgatggaatttctggactggcgtatttacggattctatttctcttttatcaatgtcatgttccgggcattgtacatcggcattacacgcactaaagtgctaaccatcaatgctattgtcatggcattaactaatgtcgtactggactatgcattaattttcggaaagttcggtttgccggaaatgggtatcaaaggggctgctattgcttccgtattggcagaagcctcctccattctctttttcgtcatctatacgtatgccacggtcgatttaaagaaatacggtatgaaccgcctgcgcacattcgacccagcattgctgatgcggattcttagtatctcctgcttcaccatgctgcaatatttcctgtcgatggctacctggttcgttttcttcgtagccgtagaacggttgggacaacgggaactggcgattgccaatatcgtccggagtatttatgtcgtattgctgattccggtcaacgcactggctacgactaccaacagccttgtcagcaatgctattggtgcaggaggcatccagcacgtgatgccgctcattaataaaattgcgcgtttctcctttttcatcatgctggggttagtagcggtatcggcactgtttccgcaattcctgctctccatttacactagtgaagctgcgctcattacggaatccgtaccctcggtatatgtaatttgttgcgccatgcttatcgcatccgtagccaacgtggtgtttaacggtatctccggaacaggaaatacacaggcagccctgttgctcgaaacgattacaattatcatctacggatcatacatcattttcatcggaatgtggctgaaagcaccgatcgaaatttgctttacgattgagattgtgtattatagcttgctgttgataacaagttatatttatctcaaaaaagcaaaatggcagaataaaaagatataaatacaagagatttttgtacatttgcaagctcaaataaagagtagacggaaaagtccctctttcggccaagtaaattgtaattagtaattcgtaattaaataactatgttcgataatttaagtgaaagactagaacggtcattcaagattctgaaaggtgaaggcaaaatcaccgaaatcaacgtggcggagacgctgaaagacgtacgtaaagcacttctcgacgccgacgtaaactacaaggtggcaaagaatttcacggatacagtgaaagaaaaagcgcttggccagaacgttcttacggctgtgaagccaagccaattgatggtgaaaatcgtgcatgatgaacttacacaattgatgggtggagagacagccgagatcaacatcgacgcccgtccggcagttatcctgatgtcaggtttgcagggttcgggcaagaccaccttctccggtaaactggcacgaatgctgaaaaccaagaagaaccgtaagccattattggtggcttgtgacgtttaccgtccggcagctatcgaacagttacgtgtattggcagaacagattgaagtaccgatgtactgcgaactggacagcaagaatccggtagaaatcgcacaacacgccattcaggaagccaaagccaaaggatacgacctcgttatcgtcgatacagccggacgtctggcagtagacgagcagatgatgaacgagatcgccgctatcaaaaaagcaatcaacccggacgaaattctgttcgtggtagactccatgaccggtcaggacgctgtaaacacagctaaagaattcaatgaacgtctggacttcaacggtgtggtactgaccaaactcgatggtgatacccgcggtggtgcggctctttctatccgttcggtagtgaacaaaccgattaaattcgtaggtacaggtgaaaagctggaagcaatcgatcagttccaccctgcccgtatggccgaccgtattctcggtatgggtgacatcgtttcattggtagaacgcgcacaggaacaatacgatgaagaagaagccaaacgcttacagaagaaaattgccaaaaaccaattcgacttcaacgacttccttagccagattgcacaaatcaagaaaatgggtaatctgaaagacctcgcttccatgattccgggagtaggaaaagcaatcaaagatattgatattgacgacaatgctttcaagagcatcgaagccatcatttattccatgactccggcagaacgttccaatccggaaatactgaacggttcacgccgtacgcgtatcgccaaaggtagcggaacgactatccaagaagtgaatcgcctattgaaacagttcgaccagacacgcaaaatgatgaaaatggtgactagcagcaaaatgggtaagatgatgcctaagatgaaaaagtaatcattctgtagatccaaatctaatgataagtaaaaagagggagtttcggctccctcttttttttatcccccccatctcttgacaaaaattccaatccctttggagagttcagttatttattttacttttgtccatcaccaataaatactctgaaaatatgactctgatagacggaaaagcaatttccgaacaagtaaaacaagagattgcagccgaagtagccgaaatggtggctcatggcgaaaaacgcccgcacctggccgctattcttgtaggacacgatggtggtagcgagacttatgtagctgccaaagtaaaagcctgtgaagtatgtggattcaagtcttccctcatccgttatgaaagtgacgtgaccgaagaagaactgcttgccaaagtacgtgaactaaacgaagacaacgacgtggacggctttatcgtacaacttcccttacccaagcatatctccgaacagaaagtaatcgaaacaattgattaccgtaaagacgtagacggtttccatccgatcaacgtaggccgtatgtccatcgggcttccgtgttatgtatccgctactcccaacggcatcctcgaattgttgaaacgttataacatagaaacttccggaaaaaagtgcgtcgtactcggacgcagcaatattgtcggcaaaccgatggctgccctgatgatgcagaaagcctatccgggcgatgccacagtaaccgtatgccacagccatagcagagacctggtaaaagaatgtcaggaagctgatattattatcgctgctttgggacaaccgaactttgtaaaagccgaaatggtgaaagaaggcgcggtagttattgacgtaggtactacccgtgtgccggatgcaaccaagaaatcaggttttaaactgaccggcgacgtgaagtttgaggaagttgcaccgaaatgctcattcatcactcccgtaccgggcggtgttggaccaatgacgattgtatcgttaatgaaaaatacactcttagctggtaagaaagctatttatcaatgagacataccctgtttctgatgattttgcttctctctttgtcctgcacctcccggtcgcaggcaaagagagattctatcattgacaccctgtcggacagcctttccgacagcatcttccccaccgacaccctacgcctccttttcgtaggtgacctcatgcaacatcagggacaaatcaacgctgcacgaacatcaaccggctatgattactccacatgctttgcgtatgtcaaagaagaaataaagaaagccgacctctccatcgccaacctggaagtgacattaggaggcaaaccttacaaaggttatcctgctttcagcgcgccggacgaatttctgaccgcaattcacgatgcaggtttcaatgttttagtgactgccaacaaccacagtctcgatcgtggtaaatccggactggagagaaccattcaattaatagactctttaaaggttccacacgcaggcacgtatatcaacgctgatgaacgcgaaaagaaatatcctcttttattagaaaagaacggattccgcatcgccctgctcaactacacgtatggaacaaacggcatccccgttacccctcctaatatcgtgaactatatcgatacagccatcatcgccaaagatattgaagagagtaaagcaatgaagccggatgctatcatagcttgtatgcattggggaatcgaataccagtcactcccggacaaagagcaaaaattcctcgccgactggctgattgaaaaaggagtaaaccatatcatcggctcccatcctcacgtagttcagcccatcgaagttcgcacagacagcctgacgaatgacaaacatctcgtagtctattcgctgggaaattatatttccaatatgtccgcccgccgcactaacggaggactgatggtaagaatggaattagtaaaagacagcactgtccgcctcaataattgtgattatagtttggtatggacagcccgtcccattcaatcaggaaaaaaaaatcatcaattgctcccagtcaatttgccgattgattcaattcctttacaagcacgtaactctctgaaaatctttgtaaatgatgcgcgaacccttttcagcaagcacaatcggggaataaaagaatatacttttttcgaaaaaaaatagcagaatcttttggaaattagaagataatatctatctttgcaccgcgttagagaaacgcaaacatggtggatgtagttcagttggttagagcgtcagattgtggttctgaatgtcgccggttcgagtccggtcttccacccaacaaaaacccttgtaagttaaatacttatgagggttttctgctttcaggaaataggcatcttagagagcaaatcatgctaaatcctacctaatattccttgttgttggtctattgttgacccccaattaagtaagttaaaatgctaacaaataatacataaatctttccgtttaacccataaaccaaatatattctctatatttgtgtagcatttgcattaaaagaacatagtatatcatggaaaatgaaaagaaattaacccgctcttccaatcgaatgattgcaggtgtatgtgccggaatagccgaatatttcggatgggatgctactttattgagaatagtatatatattggctacattcttcactgctttcgccggagtgattatatatattatcttgtggattgtcatgccgggaagaaaaccttcagacggatatgaagaccgcatgaatcaacgcctacattgatatgaaaatcaagaatatcgaccatatcgtcataccggtgtccgatatagataaaagcctacatttctacacagaagtcctgggaatggaagccgatacaagcaaccaacgctttgccgtcaagttcggtaatcagaaaatcaatcttcacgtaggaaaagcacagttccttcctactgccaagcatcctgctttcggaagtgcggacatctgtttacttacagaaggaaacatagaggaaataaaagtcgaagtagaatccaaaggaatagaaatagaagtcggtatagtccagcgtcaaggtgcgcagggtgccatccggagtatttatttcagagatccggatggtaatctgatagaagtaagtacattaatataattccagcccgaactcatctttcagttgcatcaatgcctgattcttttgagccatcatctggaatttctcgacacgtcccacaggacgtactgtttctgttgcctcacttacccgcactgtcatcatcactttactgttcttcagtctgccgcgaagataatcctgcaattcgggaatcaaagctgtaaaatcctttgcagcaaactcattatcaaccaccacttcaaaagtagttgagttgttaagcaacgccggacggagcatctgcatacgttttgcaagagcatcctgttctttcggcaactggccggcatactcctgccaataataattcaaatcccggtcattgaacataaaatcctcttccggttgttgcaccttaggaacataagttgtagccgcattctgcgatacttggtcacgctgcggattcttgatagatacccccaagctggacatcttcatcacgggaatttttcgttcttccttggcagtctgagcaactcccgctccttgtgacggagcagacgaagccgcaccaggagaagccggtgctcccggttgcacagccgcagaagcctgcggatgctgggcagtagtgccattagcagcctgtgttgtaactgaagacggagacgaatgaactggagcctgctgaacctgagtgccagaagctacctgcggctgctgtgctgcggcaggctgagtgaatacgggttttatagtcttcttagggccacgcccaccactcacgtcatccccctcggtggtaagctgtgcaacctgtatcaaggtcagttctaccagcaaacgcttatttttgctgatgcggtaattcaaatcgcactcattacacagcttcatagcccggtacaagaaaggtaacggacatttctgcgcctgttcctgataacgttggcgtatgctcgctcccacttccagtaaaggcaatgtcaccgggtctttcccgaccaacaagtcacggaaatgagacgacaatccggtaataaagtgacttccgtcaaaacctttattcaatatatcattgaaaagcaacaatgcgtcgctcaccttgttttcgaggaagcaatccgtcagacggaaataatattcataatcaagtacgttcagattatcaatcacactcttataggtgatatttcctccggtgaaactaaccacctgatcgaagatagacaatgcatcacgcataccaccgtccgccttcatggctatcacgttcagcgcttccggctctgccgtgattccttctttcgaagcaacatacgacagatgattcaccgtatcttccacgcttatccggttaaagtcataaatctgacaacgtgaaagaatggtaggaataatcttatgcttctccgtcgtagccagaataaaaatcgcatgacggggaggttcttccagcgttttcaggaacgcattgaaagcagatgccgagagcatgtgcacctcgtcgatgatatataccttatacttaccaatctgtggcgggatacgcacttgctccaccaactggcgaatgtcatccaccgaattattagaagcagcatcgagttcgtgaatattatatgaccgctgttcgttgaaagctacacatgactcacactgattgcaagcctctccgtcagcggtaggcgtcatacaattaatggttttggcaaagatacgcgcgcaagtcgtttttcctaccccgcgcggtccgcaaaacaaataagcatgagccagtttttgggtagcaattgcatttttcagcgtagtagtcaacgcccgctgtcccaccaccgattcgaacgtggacggacggtatttacgggctgaaacaatatagttttccatatccgggattctctctgtttttgaaatttcgcttattctgcaaatgtacacaaaaaaagtgataagtaataagggataaagagagaagttttgaagccgaagcgataagtttttaagttattagttttatctttgcagatattaaaaggagaaattatgggtaaactaatcagtatctggagtttcatatgcagacgcaagtacctcattacggtcgttgcatttgctgttatcattggctttctggacgagaacagcctggttcgtcgtttcggatatgaacgggaaatcagccagttgaaagaagagatagaaaagtaccgggcagattacgaagagaacaccaaacgtctcaacgaaataagtaccaatccggacgccatcgaacagatcgcccgtgaaaagtatctgatgaagaaacccaacgaagatatttacgtttttgaagattaaagaatgaaacaattagtacccgcccttttcaccgcaggcgccataatggctctcaccggagcagctgtgtttattaccggatggatatacgctccttacatatatactgttggagccggatgtatcgcattggcacaagtgaacacacccgtcaaaggaaagagcaaaacattgaaacgcctgcgtattcagcagatattcggcgcactggcacttatcctgaccggagcctttatgtttaccacacgaggcaatgaatggattgcctgcctcacagttgctgccatcctcgaactttacaccgctttccgtattccacaggaagaagaaaaagaaaggtcataaaaaaagcccgttcatagcttttcagtcttgaacaggcatcactttttttaattcgataatgttccgtccttttataaagaacggaacagttttatatcatttatttcttcactggtgaatatcttgcattcaacccgtcaacaatttcttttgtaatattgaaagtgctgtcagcataaagcaggttatcgaaaccagtgttgctgaagatcaggctatatccgtgagtcttattatattctttcaggaaagcgttgatagaatcgcggaactgcaagctattcttgttgttctcttccatcaaaccattctgaagtttgttgctcaactcttgcaaatcttgttccaacttcaccagacggttgtactcttgctgcgctctatcttgtgacaggaaagcattgttttcaactttcttctgaaaatcttgcttttccttgttcaaagaggtagccttctgattcaatgtcatacgaacgttttcgctcttctttaccatcgcctcattcaagtcaatacagaaattgtatttggcaagcagcgtatctatttcaacataggcaattttcattcctgacagttcggcattagcctgagccggagcattggtagtttgattgtcagttttgccagcacattgtgaaaataaaacgataaacgcaagagcagccaaaccgttcatgaggtagttcattctattcataattaataagtattgtttttaataaatttaattcatactatcgttcaaggctttttccaactcgttaatagaaaaacgcggcttcttttgtgcttcgcgatcttgcgactgtgcgcatccgattcctttctgacgcaacgctttattcccactcacgtgaccattcgggaacttcccacccttcgtaaagaatactttcacccctaataataccagggaaatagcaactattaacaaagttatcagtatagtctcaaccatttctattaattttgtgagtgcaaagataggctttaatgagatatgagttcagataagtcaatcaaattaaccatatttagcaatagaagaagcgaaaacaacccttctattcctattataaaatagaaacagcatggaaaaaaaagacttaaagccggctggcgtattcaagtatttcgaagaaatctgccaagtgccacgcccttcgaagaaggaagagaaaatgattgcctacctgaaggcattcggagcaaaacataatctcgaaaccaaggtggacgaagccggtaatgtattgattaaaaagcccactactccgggaaaagaaaatcttcaaaccgtcgttctgcaatcgcatatcgacatggtgtgcgaaaagaataacgatgttcaacatgacttcctcaccgatcccatcgaaactgaaattgacggtgaatggctgaaagccaaaggcacaaccctcggagccgacaacggtatcggtgtagctaccgagctggctatcctggctgacgacagcattgaacatggtccgttggaatgtctgtttactgtagacgaagaaacggggcttaccggagcttttgccctacaagaaggttttatgagcggtgacatccttctgaaccttgattcggaagatgaaggagaaatctttatcggatgtgccggaggtattgactccgttgcagaatttacgtataaagaggtagaagttcccgccggatatttcttcttcaaggtggaagtgaaaggtttgaaaggcggtcactccggtggtgacattcatttgggacggggcaatgccaacaaaatactgaaccgttttctttcacgcatggctggcagacatgatctgtacctttgtgaaatcaacggaggtaatctgcgtaacgctattccccgcgaggcttatgcaatttgtgcagttcccgaagatgccaagcatgatgtccgcaccgaactgaatattttcaccagcgaaatggaagacgaattatctgttgtagaacctgacttaaagttggtactcgaatcggaagctccccgtaagatagctatcgaccaggataccactacccgcttattaaaagctctgtatgcagctcctcacggtgtatatgctatgagccaggatattcccggactggtggaaacgtctaccaatctggcatctgtcaagatgaaaccgaatcatatcatccgtattgaaaccagtcagcgaagctcgatactatccgcacgcaacgatatggcgaacacggttagggccgtattccaactggcaggagctaatgttacgttcggtgaaggttatccgggatggaaaccgaatccgcactcggctatcctcgaagtggcagttgaatcttacaagcgtctatttggtgtagatgcgaaagttaaagccatccatgcaggattggaatgtggtctgttccttgataaatatccaacgctggatatgatctctttcggaccgacactgacaggtgttcattctcctgacgaacgaatgcttattcctactgtagaaaagttctggaaacacctgttggacatcctggcacatgtacctgccaagaagtagcgggcaaataagtcaacataaagaagagtatggtaacagtcaaaaaagaatagctgttatcgtactcttttttactatgattttatcaggtgtaagtttcctcgctccttccaatatcattgcacaagaggttcacagcagacaagcctcctctcaacaagaaagaatctctttccgtgttgtaagttggaacatagaaaacctgttcgacacacaccacgacagtctgaagaacgatcatgaatatcttcccgatgcgatacgtcattggaattatagcagatataagaaaaaactggctgatgttgcccgtgtaattactgctattggcgaatggaatcctcccgcattagttggattatgtgaagtagaaaatgatacagtgcttcgtgaccttacccgtcgttctcctttaaaagagctcagctatcgttatgtaatgaccaactcccctgatttaagaggaattgacgtagccttgctttatcaacgggatctattcaaactattatcttcccgttccatctccattcctccgtttaagcagcaccgtccgacaagagatttgctacacgtcagcgggcttctactggcgggagatacactcgacgtatttgtctgccacttccccagccgttcgggtggagccaaagaatcggaaccttatcgtttatatgtagctcacatactgcgtacggaagtcgatagcattatgaatattcgttctcatccgcaagccattatcatgggggatttcaacgattacccgacgaatcagtccattctgaaaatactgaaagccgaagcgcctcctgttaaaaccaatgacctagcttcaacaaccgactccgccaacgcctcaacagttaccccctcctcactaaaactatatcatctacttgcccgaaaagcaaaatcaaaaaacttcggttcttacaaatttcgtggtgaatggggattactcgaccacttgattgtatcaggcacgctattaaatcaatcaaatcactttttcactagcgaagaaaaagcaaatgtatgccttctcccttttttactgaaagacgacgaaaaatatggtgacaaagaacctttccgcacttataagggaatgaaatatcaaggaggcatcagtgaccatcttcctatctacacagactttgaattgattgtatattaattatggcaaacgatagtagccaatattatcaggttattacaaataaagatagtcaaccattatcagagaagtacaaacgccgctacagcatactctgacaagagactattctcactacgatgagaaaaaatactcatcgccatgagaaaaatttctcattataatgagaatcttttctcatcgtagtgagaatacttgagaaatataacgcctcatcatagcttcataaattaaattatcaaacaagagttccgaacttctatttctccatgtcctctatgatgcaaatgatgaattagtccgaatactgataaaccttcaaatcgaacttcggaaccattgccagcaaatggtcgaagatatccgactgaatacgctcgtattctttccagaccttattgcgggagaagaaataaacctgaataggtactccgtacatcgtagcttctttctgactgataatcaaatccaactcctgattgaccacaggcagactacacaaatagcgttcaatatataccctgtacacttgagaattggtaggaacgactccttcttccggctgataatccgccattaatggaatttctttccggtaacggtccaacatttccggagtacagaattgaagtgtagtcaaatccaaagttatactcttcatcacccgtcgtcctcccgactgtgtcattccccgccaattctgaaaaggactgctcactaatgtataaggaggaatagtggaaatggtattatcaaaattctggatcttgactgtattcagcgttatttcctgtacaatgccatttgcgtcaccggaaggaagcgtcacccagtcccccggacgaaccatatcgttggcagaaagctggatacccgccacaaaacctaatatggaatctttgaatactaacattaaaatagccgctgaagcgcccaagcccgcaaacaaagtagccggagacttattcacgataatagcaatgattacaatcccgccaacaaagaaaagaagcacctgcaacacttggataaaacctttcatcgggcggtctttcatcgactctcttccgtcatagatatccattatcatcaacagaatcccatttatagccaatagtaaagagaaaataatataaatgacgcacgccttctgggaaatcagcaacagctcttttccacggataaaagccatcggcaacaacgaataaaccagaaaagccgggatggtatgaatcaaattatgaaataccctacgcttcatcaacaatgtattccattgatgaggtttacgtctcgtatactgtttcatacctccaataagaattgcctggcaaagataattcaaaacgatagcaaccactatcatcagtaaagccataatagtctcatcaaaacgatcggcaactgccggatctattccccaattaatgagggttttattcatccattttcctaaatctactactaacataacttctgtcttttttttataaataacagtaaaatattcatttggtttagaaaaaaagagactagtatccgatttatcaagaatcaagacaccggtctccactgctactctctaagcatatcatttttcgatgagggctccatcagggaatcaccatcacccctatttcattcatatttactttagcaacggtagcatcaggtgtagtggcctccagtttaatgaaacgtgcctgtactttctgactgaaagcaaccgtctgtggcaacggattatgcataatattgctgaactctccactggcaggcacttctttccagctcttaccatccatgcttacaaagaattgataacggaatgccatcgtcggctttgcctccgcttttgaaggcgcgtacgtgaaactgctcaatgttaccgtcttccccaaatcaatcgttaatggagaagcagcaacctgtttccatccggaacgcggcaaattattccagtcttctttcgttgtttcttcctgcaaaggttctgcataataagcggcaacctgactaacgtaagcagtcaaccggcactcgtctattctcacccggagcttattggcattaactgccggaaagcgcaacatacgtttatatcctatcgtcgtaccttttcctacttctttccagccattatccatcaaggcttccacagtaaaagcctctaccctctgccctttcgttatatcttcctgcaacatgaccagattgatttccgatttggacttcaatgcatagacagcctcaccgcccgaagtagtgctccagtattttcttccgtttttcacccggttgtcagcaaacgtttgttgccgataatcagcaaactctttcaaccgcttgatatcagcttcatgaatcagtcccctccggtcaggtggaatattcaacaggagcactgaattatatcctaccgactggaaataaatatctgataaatgcttcaaagatttcactttaccatcttcctccgcatgatagaaccatcccggacggatagatacgtcgacttccgaaggataccagaataattccgtagctttctccaatatcttacgacttcccaaatcctctgctttactgaaaacacccaaacgtttgttgttctcttgtgaacgggcatatataccgggagtcaacacagttgcgttccattccgtttcacggcctactcctttctcgtttccgacccagcggacatcatcccccataattgccatcacagctttgggttggaggcgttggatggtttggtaaaaagcgtcccagtcatacacttgcttctttccgttcggaccttctccattcgccccgtcgaaccagacttcatgtacttcaccataattggtgagcaattccgtcaattgccgaataaaaaaatcattgtaacggggagagtctccataacattccgcattccggtcccagggagaaagatatactccaaacttcatatcatatttgtcacaggcagcacgaagttctttcactacatcgccttgtccgtttttccagggagaagaggccacggaatgtttggtagtagccgttggccaaaggcagaaaccgtcgtgatgttttgcagtcagaagcaccattttaaagccggcttccttgagggtacgtacccattgttcagcatccagttccgaaggattaaagagcgcgggatcttctttcccgtccccccattcacgtcctgtaaaggtgttgataccaaaatgaaggaaagctgttaattccatttgttgccaagcgtattgctgtggagtaggtaccagccgcgctgccatatcaaccttctgttcgatagttgcactttgaggaaattcaacatgcttcacatagtaattttcttttttctgcgcctgcgctccactcatgagagtaacagacaataaaagagaggttagtagtttattcatggtctattaattattgcaatcgtacaaagataaaataaaggtgcagatttcacgattctcatggaatattttcttacgacattccatccaatcagtgtaacccccacctttatatataatctaaataacctattgatttagtatctatttcaccggataaagggtaaattcaaaactctgtttctttaatggaaccaagtattgcggtaatactccgggaccacaagtagccgttcccacacctgcctgttcagcatccagatgcactgtcagcaatccatcgcgttccagttcattgatatggcgggccttctctaataatacatccgagaaaggaatgatactaaactggaaagcacgatccgactcaacaaagataccttcgccggaagtatctgccaacttcacccaacgtacatcggtgcggttgcttgtagattgcggagcaacataatagtggaacatccgttccggtgtggtctgatatacaccgattttaccggactgattgcggtcaatataggtttcattatctccacgtcccaagtaagaaacctgatcgtaggcgttcgacacacggaacgtcaatcccaagcgtgccattgatttcacgatggtcgtgtcgggttggaaagttgtatgtactttcagtgcaccgtttctatccagtgaataaacaaagtcagcaattcctaccctttgcgtttttgcatttagaatttctacacgggcagtggtcgaagtcttactttccttcaatgacactactttctgggtcagacaatccaatcccgcatcacgccacaagcgtgcgccgttcttatcccggttgtcattatccgttgccgggcggtaaaggctcaatgtcagcggagtagccaataattctttgccgttcaagttcaatgaagtcagcgcgcctgtttgcttatcaacggtgaaagtcgtttcacctgctttttgcggacggtagcctgtgtagttcttattaccggcaaatacaaactggtcgtatgccacctcccaatccttatctatcattgaagaagcttcacgacgggtccagctgatattcaaataagcctcacggactgtattcggaagttttacagcccccaaagtaacatcaacagtagcgtgtggtgcacaatcaaccgtttttgtaccttccgccaaaatcttgccattatctgccgtcacattccagttcagtacatactcattcaagttagagaaatcataccagttcttgacacggatagtcagattcttctgattcgccagcgttacttttatgttctgatatactttctttacttcgagcaaatgcgggtgcggttcacggttggcgcccaccaaaccgttacagcagaagtttccgaaacttggaattccttccggtccgtaatcaccgccatacgtccagtaccatttaccattcttgtctatttcgcggaatgactgatccacccagtcccaaacgcagccaccttgtgccatcggattgttttcaaatacgtcccagtattctttcagtccgccgcaactgttgcccatcgcatgaagatattcacaaagaatgaaagggcggtagatgtctttctcttttacgtatgctttgatatcgtctacactgcggtacatacgacagtaaatatccgtattatagttcaattcggcacgttcatactgtacagggcgagttttctctaccgatttcagccagtcataagtacgttcgaagttaattccgtttcctgcttcatttcccaatgaccagataacgatagccgggtgattcttagaacgttcatacatccggtgagtgcgatccatgtgtgcagtcagccaggtactatccttggctagggaagcaggaccatatcccattccgtgagattcgatgtttgcctcatcaatcatgtacaaaccgtaacggtcgcaaagttgataccagtaaggatgtgtaggataatgcgagttacgcaccatgttgatattgtgctgcttcatcagtttgatgtccagttccatcagctccttgctcacggtacgtcccagttgagaatgctcgtgtcggttggttcccttcaccaataccggaacgccgttgatgcagaaacgtccgtctttgatttccgaggtacggaagccgacttcacaaccagtcagttcggttaccttgccttgttcatccttcagttcgagtattaatgtgtaaagatgaggatgctctgcactccaagcctttacatcgggaatattcttttcatcaaacgtgataaaattgctcaatccgcgggattttatccggatagcatcctgcaggacagttttgccatcggcgtctttcagggtataagcaatagaagtagctccagatatagcagaatgtccctctacggtcacttcaagtccgaaaataccatctttgtatttctctttttctaaagaagcattcagtttataatccgcaatgtactgtttgggagtactgtaaagatacacgtcacgttcgataccactcaaacgccacatatcctgacattccagataagcacccgaactccagcgatacacttccaaagcaaccacattttcgccttcattgaggacatctgtaatatcccattcggcagccgtctttgatccctgattatagccaagtaattttccattcacccatacataatagaaagaaatgactccttcacaacacagtactaccctgcgtcctttccagtcggcaggcactttgaaggtacgtcggtaggagccgacttcattctctgcataaggcaccagcggcggattcttcttgaagttgaacattttatcatcaaactcatacgtttcgttgacatagatagccgtgccatacccctggcgttcccagttaccgggcacattgatatccgcccatcctcctgtataataagaaggttggtaaaagtccttcggacgattatcgggattcttcacccaatggaatttccactttccattgagactcatataaaaaggagactgttcataccctcccggcttttcaatgtcggaagcgttggcgtaaggccatacgtatgtgtgaggagcgagtttgttcagtcccaccgcatactggctttgccattcgggcaacggttgttgttgcgctaaagtgaaagtagcagtcagtcctgacaatagaactaaaagagttcgtttctttaagctaatattcataagcatgtcatcataattggtttatataataaattaggcacagattaagctgattgacgctattattttatatactcatcattctaaaaaccgtgaaattcgtgtaatccgtctctaataatataagattattctgcaagaacacttaattgctgtttttaactatttgattactattctataatcacttcatcaaaatagactctcgcttcctgaccgggacggacatgctcgtcgggacatatccccgcaccttccgccgtcactcggacataacgggcagatactccgcccatatctatcgaatagtcatttctaaaagttccttccagatagatttcttccggagagaagttcaattctcccatagtatggtaggttcgattgtcatcggaaacttctacgcgaatcatcttcggtttatgtgctcccattccataattcgtaatgcaaccgatggcaaatttattcaaaatctcccgcccctgcaaatctatcgtgaaagatatagaatcattttgattccagttacaccattcaaaatcagtatatttcaggcttccccgcaatccgttgactaacaacatttcgttcttcttattgccaagcaaaggttttgccgtagctttgttccatgtgagttgcaagtctaaagtttctcccatttgcttgccgttcataaaggtagcggctttcaccatttgtgtcttcgtcacacggataggtccgtcgtaacgatgagaagacattgccggattacttccgttcagtgtataatgaatctctacatccgggcggatacattccaaattcacttccaaatgtccgtccactgatgtcaccgtctgttgtatgttatacattgaacgggcatagacaattcctttttccgcaatatgcgcgttgtatgcgtccatccgcttcaagaatccagaccagtccttcgttcctgcgggcgtccatgccacttctgctaaagcggccaggcggggaaacaaaagataatccacatcttcgggtttattacagaactctgtccacatacaagcctgtactcccattaacaaagactcatattccggtttccaatccttctgtacaggttcgtaatcgaaaacatctttcagggtattgttgccaaaataggttaccggttcaaaccattgcggtccctgataacgaatcaagtataagacacgcgccggagtcatgataaaacgatgtcccttttcggcagctttcagagcagccgtacccattccctgccagcctaggataatagattcttcaggaagaaaagagctgtttgtcaactcatcccagccaatcacttcacgacctttcttacgcagataatcactgatacgtttcatgaagtaaccctgcaaatcttcttcattggccaaacgctgttttttcatccgtttttggcaaagcgggcatttctcccagtttgtctttcgcgcctcatctccaccaacatgaatatagcgagaagggaaaagctctagaatttcgtcaaaaacatcttgcaagaatgtaaatacgctatcatttcccgcacagtagataatctcggaatttcgtcctcccagtccgggaagtacaccgacaaagtctttcacaaccggacaggcaagctggggataagcagccagagcagagttactgtgtgccggtacatctatttcgggaatgacttctatctgtctgtcggctgcataagctacaatttcccggatgtcctcctgcgtgtagaaaccgcctatcggagtaggttctccccgttccgggttacgacgtgagtggaaaggcacatctgtacggtctactctccacgctcctatttccgtcaaacgggggtatttctttatttcaatccgccagccgttatcgtctgtcagatgaaaatgaagtttgtttattttcagcatcgccatacagtcaatgattcgcagtacattctttttagggataaaacaacgtaccggatccaacagtaatccgcggaaaccgaaacggggttcatcctgaaccgtcattgccggaactctccaatcgacattccggaccggttgttccgattctatggcagccggcagaagttggcggatagattgcagggcatagaaaaagccttttgtatccgaagctttaatgagtatctgttccggcgtaatctccagtaagtaggcttcactttttaaagaagaatccgtcacaaaacggacttgtccctcttcacgcccgacattcaaagcaggagttattccggcagcacgagtaaacaagtcaataaaattgcgagcaatcacggcttgttcctgactttctaccgcaaacaccgtttgggctgaaaaggtgaagttgccacggcccggcacaatctgtgtcgggcgtggtactattgaaattaaaggggatgttaagttatcagcctgcaaaaacgctgtcagtggcgaaagcagtatgagaatgattaagatgtattttttcatggcgtatgtacattggtattattccttgtctctctccggtgagaagcggacaggatcattgtattgctcctgaagtttcagcatttcttcttttagttctttcactaccggttcatattcaggttgtccgtagaggttgtgcatttccgacgggtctgcctgcaggtcgtagagttcccaccagttaatgtcattatagaaatgaaccagtttatagcgttccgtacgtacaccataatgacgtttcaccatgtgttcagcgggatattcgtagaaatgatagtagagagccttccgccaatctttcggatgttcgcctttcagcaaggggacgagggatacaccttgtatgtctgaaggaatctctgctcctgccaattcgaggaaggtaggtgcataatcgatgttctgaaccatttcggtgatgtcgcccctatggtcgaatcctttcggcagacgcatgatgagtggtgtacgcatggattcttcgtacatgaaacgtttgtcgaaccaaccgtgttcgcccatgtagaatccttggtcggaagtatagacaacaagtgtgttatccagtaatcctttctctttcaggtagtcgagtacacgaccaacattgtcgtccagcgacttcaccgtcttcatataatcgcgcatataacgctgaaatttccagttggctagttccttgccttgcaggttctgtttatagaagtcgtctattattggggtgtagaatttgtcccatgcagcacgttgtgcttcatccatacgaccaatatatttctcatataaggatttcagacgggtctttttgtcgggacgaagcattttgaggtcataaatcatgtccatgtctttcataatactcatctcttgtgcggcagcggcagggcgtccttcgtaatcgtcaaagaaattgtccggtagcgggaaggttttatcttcgtacaaagccaggttgcaagtatctgccaaccaattacggtgaatagccttatggtgaatcaaaagacagaaaggtttctccggattgcgtttgttttctatccagtcaatggcatcgtcagtgataaggttcgtgatatatccatgtttttggatagtgtcattgttctgtgtgatgaaatccggattgtaatagtcgccttgtccggggacaatctgccagtaatcaaaaccggaaggcaaactttcaagatgccatttacctaccagtgctgtctgataaccgattttctgcaacagcttcggaaaagtctgttgcgaactgtcgaatacgcaagtggtattatcatagaatttattagcacaactatgtttacccgttatcatgcaggcacgactgggaccgcttaatgaattggctacaaaactttgagtaaagcgtacaccatcggcagcaatacggtcgagattgggtgtttccatgtagcgtgtgtcataacagctcatcatttgagctgtgtgatcgtctgtcataatgtagacgatattcaaaggtttctgttccacaggcttttgcttgtttgaacaggaagcaaaggaagctacagctgctactcctgctaaaggaaagaataagtttggttgcaatttttccataaatactaatttgtataagattgtgtcagcaaagatagaggacagccatctatttaacttccacaaattaccatttaatttccaataatctccatttctgcataattgactaataaatagccggaagcatatcgccttctaacgatagcttccggcataaaattcatttcacactattgaaagctaattgaaagagatagcattaataaaataactgattagcccagactttttcagcatcagtctgtacataattcttatttgtatagatacgaatccaatcaatttccattcgaggcgtattatcatccgtttcacaattggcaatacttttcagtacattatcccaaccttcaggcgctttaccagcagcccgttccgagctttcagccaatctcataaagaagtagagaccggcactgccaccagcagcagtagcaggatcaggattagcagtagcaggagttccagccttgtcgaatggccacctgtcaggagattgtgtacgattcacagtcagattggttgctccattaattcctaaattgattatattttcatccacaagttccacccaatatatattccattcattcgcttgaggtattgctacactctttgaacctatctcattatcaacagttacagcctgagtaattacagaaccttgagtgttcttgagaatatcgatctcatctttcgtgttcggaagggaatttttctgatttttaagtccgattgtcggaacaaaaccagtccgtattcctctcaaacgcgccttcacttcaattctcataccaggaaagaaccgagtatgttgtggggcaaaaataccaccaaatttagaacattgcaatgcggcgacaccgtaatccttggtagcagtcatggcaccagtcccctgaacatttttatccacccacatatttaaaataccttcattggttatatttgtacattttgcattattcacagcttgtattttctgtgacggtgcatcattaatatcagaaaaggcccaagaaatacgatgtccgaaagcattaggggtattatttccgccactaaaactattattaatataatggaactctatcgcattgcataatacccaatctttatctttcaaagctgaagtgggatgagcgctattcttattcatagctattttatctcccgtaaaccaactttcaattgcagttttatttttatcagacataaacggcctatccgggaattcatacaccttcgttatatcaaacagattaggatctcccatagattccaaatcagtcatagttatagtcagagtagaatttatcatcggattcgctggagaatcactctccagattcaataccagttgcaaatcccctgtcatttcaaaatcctgtttaatagtcacagcatcactttttgccgaagttcttcctgcaggaattgttaatgtagaaggtaaattttcatacctatctccttccccttctttcggagtaattttcatattaagaggtacggaacttggtttttcaatctttgcaactaatacaaacttaccaccttccattactacattctccgcattgttctccaatgatgccattatccgataataatcggaaaccttaattacctgactggagccttccatcttataaccacgggcaaaagccgtaaagtttatagcagtactacccgtcagtccggatgcctttatcggaaaatccacctgaatctgtttctcccccttcggaaaagtaacgattccattgaactgttcgaatacattcgaagcatcctccgttccggctttcgccgtaaagtaaatatcaaaatcttcatttgctacaacctccttgccatcagcatccggttccacattaatattcactttcaagtgttctcccatcgcaaatgcgttgtcattgatgttcatcgttaatggcacgatttccggcagagggcggtatttcgtttcttcctcacacccagtcaaccccatggtcaacaagcatatcggaaatattttatataatatgttcttcatatctttatctatctaattatcataaatgaattttattcagttcccttacttagtcggccatcccggattctgattcagctcatggtccatctggatttcatccggtggtatgggtaacaagtaatcacgatcttcattaaacttgtagccttcaggcaagtactctttcaacggatccatccatccttcattatctgtcagtacatgattcagtccttctttccgcaatgtaggcgaaaagctcagataaagtacaccgtctttgcccagataagctccacgtccgcgtccttccacacctttcaacgttccggctaccctccaacgcatcaggtcatccaaacgaaaaccttgcagagatagctctgagcgtctttcccgacgtacctcctgcactgccggcggcaggccttggaaagggaagtgaggatcagccgccggagtaacataggccacaccggctctttgacgcaatggcttcaatgttttctctgccacgccatcgttatacagccccaattcggcggcagcttcagcataacaaagcaatccttcggcatagcggaacatgacatgagccgtttcacaattgccggttacataggtcgtatcaatgccaaggcgagtatggaacccggtcacgttcttgtaaataccatccccattcaagcgcggagatgaaatatctttattcttttccttttgttcttcttcggtacctgtctcgtcatacgctctcacattcatcaagctattagatttgaacttacaaccagtatgcatcaccatagccaaaagtcttccgtcacgatctttaaatacctcattaaagtccttatacttttcatcggtcggatcaaccggcgtaccatccacattcagaaagttatccaccaaagacttggatagtcccgaaggcttcacattatctgttactccaccgctaagctgttgagtaacggtattgaacacgccatcagctattgaatattttttccaaaaagtcacttcactaatgttggaaagatcgtttgaattgaatagctccgaaaaagcatcatctatattggtagctttcggattggttgctgtcatatgcaaagtcagtccggccgggaacaaatattgatccccccaattcatcacttccttaaaaaactcttcagagttatcttccgttgcaaaatcagttcccttgtgatacttctcccacgaaccttcgtacaaagcgactcgcatagccagaatcatggccgtttctctgttgacacgcaatccactgtatttactgcgagaatgcaaattagcacgagcctccggtatcaacccaatagccgctttcaaatcgttcaggataaaacgagctgcatccgcacgttttgtcgcaggaatttgtaaaccacccaatgtagcattaccgtcccagaaatcatccataatgggaatattaccaaaacgtgtgagcagatagaagtgccaataagcacggaagaaatacgcttcccctctcaatgaaagcacttcgtccgtttcgtccacctcggaaactgcgtaataatggaaaaagtaattcaccatacgcaagtttttatagcctttattccaatcgtcagagccactgaattgattattctctccattcaggcgcatatcatacttttccgaaaggatattgtcactgttcacctcttctcctctgacaccaataccatattgagccggagccggtagagaagtatacaaattatttatatagctttctacattctctctggttttcaagaaatcttcattgttaggctgcgtatagggtttacggtccaaataatcggaacacgccgacaacagtaagcctgcaaaaacagtcaggataattattttatttttcatgatagcgttcctctttaattaaaatgtaaaatcaagtccaaacacgaaattacggttcatcggatacacctttccgttaccattctgattttgagccgaggtaagtcccggagcagccgcattacttccgcctgcccacgcgttcacctgattaagggtttccggatcaaactgattcggcagtttactgatggtaaacaggttatcgcatgtaaagtatactttcaggttacttagtccaatattcttcaacaattgaggcttaaaagtataggatactgtcaagtttttcatacgcatatatgccgcattcagcatatagcgggtagtattatatcccgtattggcattcgttgtctgggcatcggtcgtcagtcgaggtagatatccattgggattctcgggactgaaataatcgagatgctccttgaaccattctttaccaccgaataggtaagtactggcggccatcggaaaatctctcttggcaactccttgcagtaaagtggatatttcaaatcccttatatcctacgtttagattgataccgaaactgtatttgggagtagcattaccgataattttcaaatcaccatggtcggccaatgtacccttacccgggtccactttaccgtcaccgtcggaatcaatgtatttcaagtcgcctcgttgccatttgtcgccggacttaaagaaactaagatctacttgtctgaggtatgcgtccacttcgcgattggacagaaaaagatcattcgcttcatatccccaaatctcacctatgtccattccttcataatatcctttattagttgccaaaccggtatgattgttgtatatcaatccctccggattgttgtatttggtaacaacagctttgtaattgaatacattgaatcctatgccatagctaaaaccacattttagctggtcctgccagtttacagacaattcccaaccacgattacgcaaagtagcgttattgactttcgcacggtcagccgtactaatacctccgagattcggaatagcttcagcaggaccaatcatgtcgcgcgtggtacgctgataaatatcggcagtaatagacagtcggttatccaacaacatcaagtcgatacctaagttggcattatccaccttctcccacgtaatatacgaactgatcatcttaggcgtagtggctaaagttcctttttgaggagtagcttgcacaccgggtaacagccaagcattaggtgaatcggaggtcaagctctgaatcccgaggtaatcatagagtcccgctccgttctgattacccaagcgaccgtaagaaacacgtactttcaattgagaaaccggcagattcagcgctttgaaatagtcggtacgagaaatgtcataaccggctgaaaaagaggggaacaatccccagcgatttcccggagcaaaacgcgaagaaccgtcataacgtccactgaattccagaaaataaatctccttgtaattccaattcagtttagcgtacatacccattgtagcccaatgcgtccggtcttcacctgccaatacttgcccgttagcattcacaaaagagaatatatcactagtcagcaatccgtctttataagtataaccattcgaattttcttgcagttccatctggaaacccgccatcgccttaaagaagtggtcgccccaagcatgtgtgtaggatgacgatatgtttggagacaggtagtagttgaatgtattaccgcgtgtataagagccccaattagagtttttccagttcatgcccggatattgatacccctgtttggttcccttacttatatccaacgttccgtcaggtttttcggcagtaggatatccgcgtttgaaatcattgttttctacatcgaagcgtactttcatttcacctacaatatcccacccttccagtggagtaatcgtagcggcaaacgacatcgcatcagaaattctgttctgcacataatgcgattgtttcagataacggtattcggaattgtcattatattccgactttacaggaagatgggtaggagaattcggaaagctgcttccgatagttccataaaaaatggtctggttagccatcggacgcttcagtatattcagtgaaaggttattattgaaattaaacttcaaccatttattggcttggatctgaaacttcgagtttacattgtacttactcaagttatcgtctacttgatccagtaatccttcctggtaaatatatcccaaacctacgtagtaattaaatttatcagaccctcccgttacgctcagattatgagaatggcggatggaagcttttttaaagtagtaatcataccagtcggtattggcatacacagcatctttagaacctgcccaaccggtaccgtccgcattaggtcctatgcccgggaacttttccgaataaggattctccataaagccctgcatcttttcgatgagcgcatcaggaatcgagtgttttactccatcgttatcatctcgttcgttcagataattggcaaattcaatggaattcatcatttggggcatattaataggagaactgaatcctacagtaccactgtaagatatacgtgttttttcctttttaccacttttggtagtgacgataaccacaccataggcggcacgtgcaccataaacggcagcagcagaagcatctttcaatacactaatggtttcgatgtcggcaggattcacgttctgcaaactttgctccactccgtctaccaatacataaggttcgcctccattgatagaaccgataccacgaatattgaatttaatttcggcaccggtctcaccacctacaccattagcaaccgcatcagaagagaagtttaaaccggctacgttaccctgaagggcactcgtgaggtcagtgaccggacggttgacaatagcatcggaacccacagtagccacagccgccgtgatggtgcttcgcttctgtttgtccatacctactactaccacttcatccaatacttttgtatcctcttttaacgtaaatcggttgccttctgcttttgtcacctttatttcaaggggagtaaaaccgacataagaaataaccaatgtgttacctactttccctttcacggaaaagttaccgtcaatgtcagtcagcgtcccatctttagaacctttcaccatcactgtggcaccgataatggtttcacctttatcatctaccacttgtccttttatcatttgttgctgtgccaacgcacttaaaggaaatgatagcaggagtatcagaaacagaatcaaaaatttctgtactcgcatgaacttctttttttccataatattgtatttgattaatttagattctcttttattccgtcggattcgcataatattcaaactcttcttttatgaccttcaacaaagacttgttattggttatgtcaatatctgttgccaaatcccaactcataatgcctgcatagtcttcttcacagacatacctcgctttcttgcgaatcgtttctatactgttgaaagtatatgtatttcctttatatgtatatgtatcttcattcgtagtagccaaaccatcattcacgaaatcacaataggcagcaatcagactacccgtagaaccatagaaaggcactcccatcaccagcttattcttagggattccatatgccacagctacttctccatcttttacaaattgctcgtaaggaaaacgcatcactgcagggccgtaacattgataagagataaaatccagagcatcaatagcttccggggaaattttaaaagaaaccggatgcaacgatgcggtgaagtaaacatactttcctaatgtagaacgcatttggattacagttgcactataattattatattcactggcatttgtaggccattcaaaatcaaaatcaactccatcaaaatcatattgttcgataatcttcttcacctcggaagcaaatcttgtacgggcagtggcatcagccatcatctttttccattctccaccagcaatgcccaagcgcaatcttctatctccctgttgtccctgtaaagcggtacgtatattattcaaacgccccagccaggaatgtgaatccttgccaggtttcgtggcatcatcgtatttccagtaagcaagtatttttgaattattccaattgtcaaaggtgatagggtttctacctgatgtacctactaccagactgcttacaaaagtttcatctaaataacctttaaatttatctccaatcaaaaaatcagtacgtgtattaggtacttcattagggagagcacctacaaaacttattgcagtattgtttgtatccacataaagtttcgccgttccctgttcataagtcagcccaatatagtgccagcctgttgccagatcaggagtggtaacggttgcaaccgaacttccaatagacagtttcaaactattagctgtcgcacccatttgaaaagcaatgatcgtggagtttccatccattttcttaaagagaaaagctccgtccacccattcacttatatatatataggtaccaaaggtgaatttattaaaggccccatcagcagagtgaagtaatccatcaccgccattcataaaacttgttccttcaaatttaaccactccattacgaccttgaaaagtgcctgtatgagatacgtttgtcatcgtcgcatcattcaacggcaattcaaaagctacctcaccatttgcataaggacgcgctgccaaataaatcaaatccgtacaagcacccatactggctgccgaaatacggtttatttcaaaaaaatccccccgaatgtaagagcaattaatgaatgattttacagtaggatcatccggttcttccggttcaccaggttttcctgtgattgcaccttcaggaggagtaccagttggaacgtctacccattttgtgtctttacaagctgtcaacgttccaaaaaggaagagacaaagaaataggaatttgtttctcataaatttaataattaagattagctttatttaataattgtgctgtcccttttgacaatcacgatcacaaatgtaggctatattaaaggcaaagaatgttctattttagctacgattcttccaaatttgtctaaaatcgtccatttcatcgatatatctaaacatcatagacattgttggacatcttacgaatcaaaaaaagaaagcggaagtattcattcctgaatattcccgcctcttttatattttatcctaatataactacaacaattttcctacgaagatatattataggttttctatatcagaagattgaagacccgtgtatttgataattgtatcaatggatattccgtcctccctcatctttcgagcaatttcaatttgcttcttttgctctcctttctccatccctttctccattccttcctttattccttctcttatcccttcctttagcccttctttcatcccttcttcagccgcttttctccgcatctcttcgtttttgcgccgttcatcctcctctacgatttgattgactctatatcgatctaatgccttatcataagcgatacgattttcttccgaaagatcggcaactgctgccaatctcgccagatgttcaaacacttgttctttaattgattgatcacaaccatgaaagccaacaacaagattagaacgacgtgagtataatgtttctttcatctataaattttggtaagttcacctgatttagagactattccagctttttttagaaaagattgggcattccttttattagctgtaattttcttcactacctcaactctaagttcttcccgagtttttattttctttgtagcagtcattatatacctcctttcttgtacaaagataactatttaaatccataaacataaaaaacaatcccaaactttacggatttatagccttttatagtaagccgtctccctttcaattcctccaaacaaacaagagaaatgttctatttttcagattaagaaagaaaacaaaactattgaagatggtaatccggaattaaaagcatccatattatcacatatatatgcatattactaccacaatacagcatatattttcagatgatatgcgttttctttaaagaaataaatgattttcctcggtgagcaataagccattcctcggtgaggaacacatccttcctcaccgagaaagccttccatactcaccgaccaagttataaaagccctcggaaaagcctgtttataggctagttcatcatcatatacgcaccaaaaaagaatgataaaacaaactacatacgggcaaacagtaagcatatagatagcaatacagaggaattatttatttttagacaggaattatccaggataacaaacaatcctacattctttcatccaaaatgcagagcgttttttccttcaccacaaacaagtgactgatatattaaaaacagaaagaatagaatataccctttttcagatcagcacatttctaatcccatcctttcaacaaccatactctttcagagtctgcatcaacttcgcgccattgatcggcttcaccagataatcatcacaaccggctttcaacgcagctacccggtcagcatcaaaggcatgagcagtcagggcgataattggaatttcagcattgaacttccggatctccgaggttgcagtacgtccgtccataacaggcatcttcatatccatcagtaccaaatccaccggttgggtacggacaatctcaactgcctccagtccattcggtgcgtgtaacaactggcatttgtttttcaagatagaagataccaaaaagaagttactttgtatatcttcaacgaccagtactcttttaggtactttttttgtttcttcggagtcaagaatattttctttattcgcatccttctcattgttccgacgtgaagaagtcggttcgctgttaaccgattcgaactggcatggcaaaaccgcccaaaataaagaccctttatcaaattctgactcaaagcctatctctcctctgcaagcctcaacaatggctttacaaatggacaatcccaatccggttccctgtgcaaattcatccagtttctcaaaacgatgaaatactttatcttttttatcctccggtatgccgatacctgtatcgcgaacgtaaagacgaatattttcgtctatcttctcataccccatttcaatagttcctttggaggtatatttgatagcattagttacaaagttagtgagaatctgcgctaaccggtttttatccaaacgaacggtacaggcttcataaggattcacgggaactaaccgaacctgcggatttactacacgacgatgcatcgaagcagctaattcgttgaaataaacagccaaatcaaaattttcgtatttcagttctaccgagccggcttctattttcgaaagatccagtatgtcgttaatcagcttcaaaagcaactcattgttggcattgataatctgaataaattcttctttttcttcttgatcttccgtcaccatcaataagtcggaaaaaccaacgatagcatttaacggtgtacgaatttcatggctcatatttgccagaaaggcggatttcaacttatcggattgttcagcgcggctccttgccttttcaagttcaccaatcatgtgctgccgctcggtaacatcatctacacgaatcacgacaccgtcaacatctccctgttcattaaatatgggagtagcaaagacttctatgacatgcttgttatccagattaaacaagatagactctacctgaccggatttccgggcacgttgcatcacacaattctcacaaggagtggtgcgattatgggctgtcagatagcaaggttctccttttttgtaagcctcataagaaaggcttttactacaaagcgagatattctcccattgtacgatatagtcgttcgcaatatatgccaatcccgaattaatattgttcaataccaattcattctgacgaatcaaatggatcattctttgttcgctctcaagaagttcttttttcgaacgcacaacctcttcgtaaagattgtcatatttgttttgccacaaaacacgttcggtgatatcttgagttatcaccatataattggtaatttcagacttatcattatgtacaaaagaaacggtaatctcgaagaattttataccggacagattagtaggaaaaagacggcacaagtcatcaaaatcatattttgccatgaaacgcactgtttctccttttctgatctgttccttgatttcatcagagaaactggtgtagttgaatagattatagcccaaaatatcctttttgtcttttatccccattgatctcaaccgtgaataattgacatctatcatgagaccgtccttatcatacaattccaagcctacagacaagtcattaaagatattatgcaataagttatcagctatcccatttaccaaagtctgttccatgcagcaaaatttgtatagtattacaatattgattgtttatccaagcaaagttactttaatattttgttacatagaaagaaagaggccttttagcctctttcagtatctttatttcgcattttggtataagaagccttctgctttcgctaatgtttccggtttgcctatatcaatcagatgcaacttttctgtcaagtaaccaccatagtttacttgccggcaagtggcaagatagaaatccatgatagagaattttccatcccatgagggagaggtcatccattgaaaaatggcgggcgaaagtacatggatgccactgaatgcatattcccgataaagggaagaatcatactgaaaaccttccggtttcacttgttccgtatccttgtttatccatccgcaaagtctcttatctgtatcaaaaagaagatagcgggaggttttacgttggctggccagtaaagtggcaacagcaccgcttcgtaaatggtagtcatataattctttcagattcacgtctgaaagaatatcgacattgtgtatcaggaaaggctcatcggagttttcaaagaaagaacgggctttcttaattcccccaccggtgtcgagcaacagatcgcgttcatcggaaatatgtatgataagcccaaaattctcattggcttctaagaaatcaagtatttgttcgccaaaatgatggatattaatcactatttctgtgaatccggcagctttcagttttaagatcacatgttccaacatcggatgtccggctatgggaaccaaagccttcggcatggtatcggtgagcggcttcagccggctacccaaaccggctgcaaatatcattgctttcattctttcggttactttcttctttaatatttactcttcttagattgttgcctcaaacgtatgttcgatattctgttcccgatgcaccagttcgactttcacaccaaatttctgattcaggtgctctgccagatgctgggcagaataaacagaacgatgctgtccgccggtgcaaccgaagcagacggacaaattgctgaatccgcgttccatataacgttgcacggaggcatccaccaaagcatagacatgatcgaggaaacggagtatttctccatcttcttccaagaaagtgattacaggttcatccagtccggtgaaaggtttgtaacgctcatacttaccgggattattcacggcgcgacagtcgaatacataacctcctccattgccggtagagtcatcaggaattcctttcttataggcaaaactcattactttgacggttaactgccgctttttcagatcgtccgtaaattgtttcagtccggtaagctctcgcaaaacgttacagagatacggatattccggatattcttctttcaacaattcacgcaggttttcgatggcataaggaacactttggataaaatgcggtttcttttcaaagtaaccacggaaaccataagctcccagcacttgcagcgtacggaaaaggacaaagtgacgaagctggctataaaaataggattcgtcaatcggttggtatttgcgaagagcttccatatactcttgcagcagttctttacgaagactatcgggatatttcgctttcgcttgccacaggaaagaggctatgtcataatagaacgggcctttgcgtccgccctgaaagtcgataaaccatggttcgccatcttttatcatcacattacggctctgaaaatcacgatacataaaagtagcggaagaactacgaagcaagacatcactcattttctggaaatcatcttccagtttatcctcctgaaactccataccggtagctttcaggaagcaatatttaaagtaattcaaatcccacaaaatggaacgttgattgaactccggttgaggataacaacgggaaaaatcaaatccatcggccccggcaaactgaatggcaggaagcaaacgaatcgttttgcgaagcaactctttttcctcttctgaaaagacgctggtagcacgtcctttctctatggcatggaacaacagagtatcgcccaaatcctcctgcaaataataggtcttatcttccgaaacgatgcgcacttcgggaacaggcagtccacatttgtggaagtgtcctgccatataaagaaatgcttcattctcatcgatagaagctccgtaaactccaatcaatgtttctatacccgtcagccgaaaataacggcggttggaaccggaagacggtaattctgttatgttttcagcgggaacgcccgtatatgactgataaagtttctgtagttcttcggtaatcatagtcgtatattttcgagcaaagatagagaatctagctaaataatactatcttcccgctgataaaaaccggctactttacctaatctgctgtgtacaggcctttacttccaataagccggttatttaaaaaagttgttggaatggctccctatgaatataagatgaagaattagcaattctcattgtattcaaggattttcagtgcagagattaaagattttcagtacagaaatttataatagtttatgcagtcgagtagtcatccccttataaggtgacaataatcattttgtaaagtgataaatagcaccctataagatgactattatcccattacaaggggacaacttatctttagaaggacggaaagctttaaagatacaaaattaaatagaaaaaagcaactatatataactcttttacctgaaggaatacaaaataagtttgcttttcaacaaacattcatccgaatgtattatctttgttttagtttaactgacctaatctcatgagaagaaagacctttttactactatgcatcgcatttatcgcactgtttatcggcatctcccctcttcaagccggtcattattactataagcaaatctcactaaaagacggactgccttctaccgtacgatgcatcttaacggatgaacaaggttttgtatggattggaacccgctccggactgggacgatatgacggacatgaacttaaaaagtatgtccatcagtcaaacaaccctcattccattcctcacaatttaatctaccagctgatagaagatgtacaaaacaatatatggattctgacagataagggagtggcacgttatcagcggcaaagcgatgactttcttataccgactgatgaaacaggaaataatatcatcgcctattccgtctgcctgactgatgatggagtgttattcggttcgaaaaataaaatctttttctataattatcaggatgccactttccgcctcctgcaaacgtttgacctagagcccaattataatgtgactctgctaagtctatgggataaacgaacattactttgttgtagtcgctggcaaggactactcctgctcgacctgaataccggaaaatgccgccgtcctcctttcgattgcggaaaggaaataatgaacgtactcatagactcacaaaaaagaatctgggtagccccttacaacggagggctgaactgcctgacacacgacggtaaactactggctacatatactacccacaactcttctctaagtaacaatgttgtactaagtctcgccgaacgggaaggagaaatctggattggaacagacggaggaggcattaatattctcgacccggaaaccggacatttttctctgctggaacatgtgcccggaagtgacaactattcacttcccgccaactctatcttatgcctatacaacgactacaacaacaatatatgggcaggcagcatccgcaacggactaatcagcatccgggaagtttccatgaaaacatatacagacgtaccacccggcaacgaccggggacttagcaacaataccgttctaagtcttttccaggaatctcaagatcaaatctgggtaggcacggacggaggaggtatcaacaactttaatccgctcacagagaaatttactcattatccctcaacctgggaagacaaagttgcctctatttgtcagtttactcccggtaaattattaatttctattttctcacaaggagtatttattttcaatccggcaactggagaaaaacaacctttcaccattgtcgacgctgaaacaacagcactcttatgcaatcgaggcaaggctgtaaatctactccggaacactcatcacagcattctgttccttggagaacatatctatatatatgatttgaatacacgtactttcagtaccgctatagaacaggaagaacaagatattatcggtgctctcctgccaatcggcaattataggaacaccacttatctaaatgatacgaagcacatatatgaactggacaaccatacaaaccggctgaaagccctatacagatgctggaaagacacgaccatcaactccgtttcaagagacgaagagggaaacttctggattgggaacaattacggattggtacactacaatcccgccaccaaaatacagactccgatcccgacctctctatttagtgaaatcactttgatcgtatgcgaccagcaaggaaaagtatggataggagctgacagcatgcttttcgcttggcttatcaaagaaaaaaagttcgttctattcggcgaatcagacggcgtaatccagaacgaatatctttccaaaccccgcctgttaagtatgcagggagacgtctatatgggtggagtaaaaggtttactgcacattaactgcaaaataccattaacaacttctgaacttccccaactccaattatccgatgtcatcatcaatggagaatccgtgaataacgaattaaccaatcgaccaacagggatctccgctccctggaacagtaatatcactatccggatcatgtcgaaagagaaggacattttccgacagaaagtgtacagataccagatagaagggctgaatgaccagcaaatcgaatcgtacaatcccgaactggctatacgttcacttcctccgggaagttataagattatggcttcatgtacagctaaagatggcagttggattcccagtcaggaagtactggaactaaccattctccctccctggtatcggacatggtggtttattcttagctgtaccgttcttactgctgccgctattattgaaactttccgaagaactctaaagcgtaaggaagaaaaactgaaatgggcaatgaaggaacatgaacaacaggtatatgaagaaaaagtacgtttccttattaatatcagtcatgagctgcgcacacctttaacgctcatacacgcaccgcttagccggatactgaaatcgctttctgccgaagatacacaatatttacctataaaagcaatctatcgccagtcacagcgaatgaaaaaccttattaatatggtactcgatgtacgcaaaatggaggttggggaaagtaaattgcagatacagccgtatgctctcaatcaatggattgaacatgtatcccaagatttcgtcagcgaaggtgaagctaaaaacgtccgtatccgctatcagcttgacccacaggtcaatactgtaagtttcgataaagataagtgtgagattattctaagcaatctgcttatcaatgccttgaaacacagtccacaagatgcagaaataacaattacatcggagttgctttccgagaaaaatagcgtacgtatctccatcattgaccggggaaacggattgaaacaagtaaatacacaaaaactcttcacccgtttctatcaaggtacaggagagcaaagcggcacaggtatcggattatcttattccaggattctggtagaactacacggaggctccatcggtgcacgggataatcaggaagctggtgcaacattcttctttgaactacccttgagacaacaatcggaagagatcgtctgtcagccgaaggcatatctgaacgaattgatgaacgatgatagcaaagaacagttaccggaggaaaatacgtttgatacgagtccttacagtattctagtggtggatgacaatccggatttgacggattttctgaaaaagtcactgggagaatatttcaaacgggtagtgattgcttccgatggtgtggaagcccttcaactgaccagaaatcatgctccggatattatcgtcagtgacgtgatgatgccgagaatgaatggatatgaactttgcaaaaatataaaggaagatattacgatcagtcacattcctatcattctgctgacagcaagagatgataaacaaagtcagttgagtggctacaagaacggggcggacgcttatctgactaagccctttgagatagaaatgctaatggaaatcattcgcaaccgattgaaaaaccgcgaatctatcaagaaaagatatttgaatacaggattagtccctgcgccggaagagagcactttcagccaggcagatgaaacatttctgctgaaactgaataaaattattcaggaacatctggatagcagcaatctggacgtcacttttatctgcaaggagataggtatgagccgggcttccctttacaataagctaaaagctctgaccgatatgggagccaatgattacattaataaattccggatggagaaagcgatcacattaatcaccagtacggacatgtcgttcacggaaattgccgagaaggtcggcttcactacttcacgctatttcagtacggctttcaaacaatatacaggagaaacgccaactcaatataaggagaagagaaaacaggaacggaaaaaagagtaatgagcagctacccgaaaaaacaaatattctttaggcacggaattctaagacctgagcaaataatccgtgcctaaaaattttaatatactgcaagtttcattacttactcaaccattgacttttttatagtcttccagaaacttcttcaatcccgaatccgtcaacggatgattcaataaacccttgatagcactcaacggacaagtagcaacgtccgctcccacttccacacattcgataatatgtttcgtattgcggatagaagcagcgagcacttgtgtcttgtaatcataggtacgatacatacgtacaatatctcccacaagccctactccatcttcacaaatatcgtccagacgaccgacaaaaggcgaaacataggtagctccggctttagctgccagtaatgcctgtcctactgaaaagactaatgtacagttagtacggattcccttttccgtgaaatgtttgatcgctttaatgccatcggcaatacaggggacttttactacaatatgcggattgagcgcggcaagttcttcaccttcacgaatcattccttcataatcggttgctatcacctcggcactgacatctccgttgacaatcttgcatatcttgatataatgttcacgctgattctgcgttcctttgataccttctttcgccatcagcgaagggttggtagtcactccgtcaagtactccgaggtcataagcctcctgaatttgctccaaattagctgtgtcaataaaaaatttcatactcttaatttttaatggttaacgatctaatagtcaaagataataatttatttccattcatctctgattatgcaatcgttattgacgaatcaagatatacatcctgaatagtattcaataattccaccccttcgttcattggtttctggaacgctttacgtccgctaatcaatcccatacctcctgcacgtttgttgactacagctgtaatgacggcatcacgcaaatcggaagaaccgtgagattctccaccggagttaatcaaaccaacgcgtcccatatagccgttggctacctggtagcggcaaaggtcaatcggatgttcggaagcaagttcggtatacatacgctcgtcgatctttccgaaaccgatagctttgaagccaccattattagtcggaagtttctgtttcacaatatcagctttgatagtcactcccaaacggtcggcctgtcctgtcaggtcggcggcagcatgataatcgacagcacctttcttgaaatcattattgcgcaggtaacaccaaagaatggttgccatccccagttcgtgagcatattcaaaagcttcggctatctccacgagctgacggcgactctgttccgaaccgaaatagatagtggcgcctaccgctactgctcccatattccaggcttctttaacggtaccaaacaatacttggtcgaaactgttaggataagaaagtaattcattgtgattcaacttaacgataaaaggtattttatgggcatatttacgtgctacggatccaagaatcccaaaggtagaagctactccattacagcctccttcaatagccagttttacgatattttccggatcgaaatagatcggattgggggcaaacgatgctccggcagtatgttcgatgtcctgatcgacaggaagtatagacacataaccggtatttgccaggcggccatgtcccaacaacgtttgcagactgttcaatactctgatgctccggtccgaatcaatccagattttatctattgtatcgggagacggaacatgaatcaatgatttatcaatggtttcgcaagtgtggtccaggtaataacaggccttatctcttaataattctactactttactcataacttctttttttaatgtgtaacttttctattttttctttccctgattggctactgcttccatcagttttttgatctcttccgggtttcccaggaaatagtcattagcaacgttcaggttttcatcaaactcaaatacgtaaggcacagccgtaggtagattcagcttgacaatatcttcatcggagatgttttttagatgcttgatgatgcctctcaaactattgccatgagcgaccaccaacagcgtatgagctgttttcagactaggaaatatatcactttcccaataaggcataatacgttcaatggtatctttcaacgattcagtacgaggcaactccgcatcgggtacttcatgataacggtaatcaaaacggggatttctcaaatcactttctgaaagaggatggggagctatatcatagctacgacgccacactagcacttgttcttctccatatttctcggcagtctcggctttattcaatccctgcaattcaccataatgcttttcattcaagcgccagcttttctctacaggtatccagtccagattcatcttatcgagaacacagttcaaggttttcaccgcacgcttcaaataggaagtataagccttatcaaaattgaaaccatattctttcaatgtctctccggctttttcagcttcggcaactcccttttctgtcagatctacatctgtccagcccgtaaaacgattttctttattccatgcactctctccgtgacgaagtaatactatctttttcatttctaaaattctcctttcttctttttatatatacaacagattgtttcttcacaaagttcactagaaaataaatagttgtcaatacccagaaataatgattctttctacaaagaagcgggatgcagtaatcagggatataaaaaaataccctcctctaattctaagcttgcattatggatgatgattcatcaaagcaaggttatcattagagaagagtaagtctgtaaaagtaaaaagagagagtttatatatacaagaaaatctgttctacttttctatttttttctattcttcgttttcctcaaagctatttatcagaagaccgcgtatcagcatcttttccataatatccttcttttattttctgaacgttgcgcagcaatactgcataatgccggtaattgagatctccctccttagaagcagcaagttgctcttttactgactcttcaatcttatctaaatgctgttctacaaaaagctgaatatcagaacggctgattgccagatttgcattggcaccatctttgctactaggtttaatcattccttcgacaaaccccagataagtccggtgcaactgacggcggaaattattctccagttcattgggatcattcaacggtttccatattgcagtaaatacatcgttcaaataatcatcgagtgcatacgattccgaagaacacaatgaggttgagtaaatattatacaacattcccggtgcaagtagcaaagctacaacagagctttggcggtcacgaatctcatccaccggtttgactccggtacgactcaccacttcatcagggtagagccagagtggagctacaaacaaattgcgtcccaaccattcaacagcttctttctgcaaactgcgtggcagataatcatgcactttgagatccggcaaattattggtatagcgtcctcctatgttcttctgcacttgcagggtatacttcagatgttgggcacgaaccgaattataaatggtggttaagtcagtgtactctccgtcaggctgtgctgtccaggtcagtatgttttccatcactcttttcaggttctttataccgtattcattggctttcatattattgtcgcccaagtcctcactctggctacggggatcaaatccctttccttcatcaccaacaaaccacaagcgatgatctccccgcagttttttggttacttcggcacgtaatacgtctttttctttataaggatccttaaattccggacgatagcgatatccccattggatagcccatttgtcataaacaccgatacgagggaacaatcctttttcggaaatccgatcttccggttgggctacataattaaaccgcgcataatccatgatcgataccgtatgaccattggcttctacccaagctttatcacgcagtttctctaccggagtagccgaactggctgccatattgtgccgtaagccgatactatgccccacttcatgtgaagagacaaactgaatcagactgcccattaatttgtcgtcaaaagtcatcgtgcgtgcgcgcttatccagtggcccgcactgcaccatataccactttttgagtaagttcattacgttgtgataccaacaaatatgactttccataatttctccactacgcggatcgacaatacgcggaccgtaagcattctccgtttcggagggtagataacgtatcacactataacgcgcatcgtccaaactcatattgggatcgttcggccattctttagctattatagcgttcttgaatccggcagcttcaaatgctgtattccagtcttcgacacctgctttaagataaggtatccacttcttcggtgttgccggatcaatgtagtagataatgggatttttcggttcggagagttgtccccgacggtaacgttccggatctttcggttccaaccgatagcgctggatgatggctccacgatcggtagtctgctggtcgtccgaaaattcggtcaacgagttttggaaaaatcccacccggtcatcggcaaaccgtggctgcatcggttctttgggtaacatcacgatgcttgtattcagtttcacagtcaccgaaccagtctgtgcagccggtagtctaccagcactaatactataagtacgcaaagtcactgcctccacgttgataggataggtttttatcgtatccataaatgtgcggtcctgggctaaagtaccgatgccaagaatggaacggtcgcttgaggtaaagccacacaatttattatcacctaaaaagagttttgatacatcaatgagctgtgcctgaatctccggatttctaccgattacatcaaacttatagattacaggatctacagtcgattgtttcaatgcctcggcaatgttatcacccggacgggcaaactgtgattgcacatattcgcgtaaaaagagagtcttatcatcatgctgttcccaataaacaacactccggttcacctcttctccgctaagcattttgaaaccctgtggcactgctttaaaccgggtcacagccaacaacaaccgtcctaaaagagtatccggcacttcaaaataccagttatctttgatgtggcgtaccgtaaacataccctcacattcacttcctccatctttcaacagtttttcataagccgttactttcttaacagtgtctttcttgaccgtatcttcctgtgctaccagtttcttctttccactttccagaagagatataccactggcacgagctcccacaccttgcaaggacaggaacgccaacacagccatcatcaaaatctttcgcatagttttctctttatttttttcattcgttagtgttcattgtcaggttcggatttttttcacgggcagccaacgggaatggaatgatatacaaccgtgaatccggcttcaacgtatatgtctttttctcgacatccgtagataccagcgggaaagtacgggtgattgtctttgcgtaatcagcttccgtattgtatcgtttcaaatcccagaagcgactaaatccggagattaactccttacggcgctcatcaatgactgcctgcaccatcgcacgttcggtagcaggttccggcaatacagcttcggctctcttgattcgtttttcacgcaactgattcaatgtttggacagctcccggtatatctttcagccgtgctttcgcttctgccagaatcaggtaaacttcggcagtacgcattcccacagacataggctgaaacttagaataagtaatcgaagtattccacaaagcagctcctgaaccttcgtcaaagtagtatatactgttgtcactcgttttaaagaattggttcaaacgttcatcattctgcccgaaaagttgtaccatctccgggctaagcataccataacaaaaggccaaaacttcagtaggaccacccatataagcatagttcagcacttccgggttaccgcctttggcataagtagtaaccttagtcggacctcctttagctcccaaatcaatataatcaatcagggtattattcaacttcaatgattcttcggcagcttctttcgcttttttccaatctcgatggaacagataaacacgggcagccaacgcatatccaaaagcttttgacggatgatatacattcaccggctcttcctgtaaataaggaagcgcttcttctatatccttaataataaaatcgtatacttgagcaaccgtagatttggttggagtagcctccaaatcatatttatcaatgatagcaactccaccgtcagtggctgcagtttccggattatatgctttcgcaaatgtatttatcagaataaagtgatcccaggcacgcatgatctttgcttccgcttttgccaattccttaacatctttatcacccagactagcatcaaccaatgaaattacgatatttgaccgtaggatatatgtataacaattttcatataaattgttatcacttagctctttccggttagctgcctcattaaaagtcatgttaataccatcccatgaaataaattcattacctatgatattcgattctttcgaccagacattatcgctcaacaaggcaaaagctgccggatggtaggcccggttgggcagggctatcaattcataataagtatcagtagaatccaccgttttcttgcctgtaggagtaatatccacatagttttcacaggctgcaaaacccaatatgagaataactggcaatatataaagtaatttacgcatatcttatatcttttaaatggttagaaacttgttgataatccgatggagtaagtcttgggagaagcgatgccacgtgtaccgtcattcattccatagctttccggatcaatatcacttcctgccttacaccaggtaaacagattatttacctgcactttcactttcagagaagagaggcggaggtgttggcaaaccgtaaacggtaagttataccctacactcaagctacgcaattttacataacctgcatctttcacattgatgtcaccgtattgccaccaatcttggaaagtgctggcataagttttcacctgtgccggtatatcgaggtacatacgtacctgtgcattcgaatcatccgcagtccaacggttggcaattcctttcaaggtttgagtacctaactggtcatccatttttaatacactgttacgcagcttattaccaccagcatacacaaagaatgcattcaaatcaaaattcttatagttgaatcttaaccccactgacccgctgaatttcggagtcagcgaaccaaggttcaccaagtcatcagtacctttgagcgaagaaccagaagtgatactggctaccgtgccgtcttcattaaatttcaccagatcatttccatctttatccactgctaccggatatccattctcgatacgatgtatacggtaagcccataacgtattataactagtaccttccataaaatagttcagcggactctttataaagaggctcgcattgtcggattcactatgatccaccttcaacattttgttcttattatggtcaaagttaaaatctacagcgaagttccagtctttcttacgtatgatattggctgaaagggaaagctctacaccacgattacgcatctcaccattatttactacacgtgagccagctcctaaagtcggatccatatatcggcgtaccaacaaatcagatgagtgacgattataatactccagagtaccacttatcagattcttgaaaagacggaaatctaatcctatattgtaagtagccgttttctcccagcgaagcttcggattcggcagatcatcatcctcgtaagtcagataagtcgttttgatgggattgctctgtgtttttttctttacaacaaaataggtagtcgaagcttgatctacattaccgttaataccgtacgtcatacgtagtttaaggtaatccagccaggaaatctctttcatgaatgattcttccgacagaatccaagacgcaccgactgaccacaaaggatggcgctgattacgtatatcgagcccgaacaaatcggcttgatcccaacgaatacttccggaaagattataacgtgacagataagagtatcctgcatttgcataaaaagacgcataacgatggcgtgactcgtgcaaagtagcagacagccccgataaagtaatcgttctgtcagaaagagcactggttcctacaccgtcacgataggcttgccaattcataaaatcagaagttaatgtttgcggatcgtagccatacaacaattggcgggcaggtgtcggaatcttattttcacgaaattccagaccggcaatggcagttactgcatggtccttccaagttttatcaaagtctatttggtttcgtaccgtgtaacgcttactttcaacttctgtctgagaaaaacgtcccccttgcggcaattgtgcttttccatttgtatcaaccatactgttatgtagcatacgcattgcataagtattttccgactcaaatagttcactcttacctttattccattcatattgatacatgaagttgtatttgaatattttcaggaaacgagcctgtaaacttacaaacggacgaatactaacatcatgtgactttgttatgctttcctccaatgcatcaagtacattgaaaccaaacgttctataaggtgagacaccttcagcttttcttacaacactcccattataggaaggatatgcacctacattcacataaggagaagtataatggttaccgtcggcatccaatatccgctcatatcgttgttgcagggtatagctggtataactgctattcggagtatgactacgtcccatacgtacgtccactccggcattcagattcaaccagtttgtgaccgcataattcgatttatagtacaaagaaattttattgcttttaccgctaataacgcgctgactatccttttcataattgaaagaaaggaaatgattgctatttccggctttctgtgatacagttacattatagcgctgggttatagccgtacgccaagcattatcacgatattccttataataatcattattacgccattgtcccaacgtagcatttacttcactactggtaatatctccattggcctgatccagatagagttggaacaagggattataataattgtactgaaaagaagataaaaaattcgccgcacttcctttttccgctacattagcatcaaaaacagctgtttgataatcaataatatcacttgttgaagctaagttcaagctcttgaaacttggtttggtagtgataaaccagtctgcattaatactcacgtgcgcaccttctttctgagcttgtttcgtggtcactacaataacaccattggctgccaaagcaccataaatactagcagcggcagcatctttcaagactgtgatactttccacattataaggatttatctcgctcaagcttaaattggttggcatatcgtccacaacgatcagcggatttgttcctacgtcatccgagaacgtacctactccacgaagaataggactcatatcacccgtattcggattaatattcatacgcaaacctgctatctgcccttccagagatgaggccaggtcactgtgcatttgtctgttcagttgttcggaatcaacgaaaccgaaagctgcagtagaacgttcacggctaatacgctgatagcccgtcaccacaacatcccccaattgttgcttgtcctcatgcattatcacccggacattgttacggtctttaacagaaaccttttccgactgcataccgacgaaagacacttccaatgtatgtacatccaccggaactttacaaataaagtttccctctgcatctgcaatagcaccaaaaggactattgagcactttgatatttgctcccggcaaaggattaccaccctcatccactacctgtcccccaacatttctgaacttacctgaagcagttgtcgaggtagctttcactttacggacagtgatgaaattttgtttcacatcatactcaaaaggctttccttccagaatcttctgaagtgctgcaaaaggagccatctgatatatactcacagttacacgatagggtgcaacgtcttcactgggaaaattcaccttataaccagatacattgctgaactgtttcaaggccgaaccgagcggttcgtttttcatctctaaagaaatctgcctgttttctgcattctgcgcccatccttgcaaggctgttgctgtaaacaccagcaatagaaaggcagttctcatccacacaagcttttttttagttcttttttctaataatgtaatttgttgctttttcataagagttgtatttgtatagttaaatctgtttgatcgtaatggttccgtcctgatagtctacctgcactttctccaacttattcagcagttccaatgcttcatccaaatgggtatttttattagcccagaagttcaacctgatatgatacaattcgcgccgctcgaaatcgatattcacattataccatcttcccaaagcacccatgatttcttccaacggcacatcctcaaagtagaacattccctctgtccaggctgtatatgtagcgatattcacttctgatactttttcctctccggtttccgtataggtcaaatcctgtcccggacgtaatgttaccgacttattgttaactgtgtttgtaacctgcaccttaccattcaccaaagttacatgacgatcttcaacagtataggaacgcacgttgaatttagttcccagcaccatggtattcatgccattagcacatacaataaacggatgttcggcatcttttgccacttcaaagcaagcctccccttctagttccacacgtcgttcttttccatgaaatgccacagggtagcgcaaacgactttcagcattgagccataccttagtcccatcagccagtaccagcagaaaatcttttccacgtggtgtagtcaaagtctgacagcatacagtgtctgccgagacagttttccagtctttcacatccatcacactgtctgtcaataactgctgttcactacgaccatccatttgtaggaccacatgttcatcattgttgttcgcagcaaaaaaacgtatcggctgttctgcaggtaaagaagtggaaggaagcaaagaaggaatcagaaaagccagtatcaagacagctgcagcagaagaagcaattgccaagatacgcattttctttctgtacttgcgtttccgttgcagattctcacgtatcacagcttccttacaagccattaattccaagaaaagttctttattttcaggtatacctatccactgaagaaattcatcagtttctcttaattgtggatgttgtatggcacgaagtgcataatctaattttttatctgaatggtctatcatagtgtcaatagtttcattaaacacgtaaaggttactgaaactgatgacaccccgataggattttttttaaaaaaagatggttaattgttttcggagtatctttaaagctctggcaatgtgcgttctaacggtattatcactaatacgtaacttttcactgatttccgcacatttcttttcatttaagaagaattcttccactacggttcgcatttgtggagccatctggcgaatactctcctgcatccggtttatcttgtcttcatactcacggtattctttcacagtccagccactgtaaagttcttccagatatctttccgcatttttatgcaccacgttctgatgacgtatttggtcaatacaacgatttcgcaccatgacgaagaataacggcagcagatcctcttccgttgtcaaccgttcgttgctctcaagcaccgaacaaaagacatcgttcaccacatcttttgcgctttcctcatcattcagcagattatatgcatgaatatagagtttttgccaatgttccctgtatataacagttatagcattttgactattattcatgtatttatagttactttttgcgtttcatagagcgcaaagataaccaattggagcaaaaaacactctatttattaaaaaagattataattcatataaatacatttgttgttatagacatattctattcccatcgtctgactcttaatattttgacactatgtttctctccagaaagatacgattcacaactatatccagccgtttccattcatctggacattgatttaatcttcgctttatctttacgcgtacagaatgcttcgattactttttttacacgaagataatttattgatactctgctcatatatgcccattttctttgtaatacatactttccttgtgatacaatcatactatcttttacttttttaaggtggaattcaacaaaaatgattatttttacgagcaaattattgtctaactacctgataatacagacataccttgaaaataaacgaacaaaacgaaagcgaattcctacaaaagcttatgaacaaagcgaatataggatggtgggaagctgacttgaaagcagagacttacaagtgttcggaacttatctcccaactactcggaataggagaagacgggctcatcagtttcgaagatttcaacaagcgtattctaaaagaagatcagggatacgcaacttttccgtcttttgacaaagtacaacagactgtagaagaaatatacttgtttgatactcccaaaggtcatgtatggattcgtagcaaggcatgcttccaggaaacagacgaaaatggtaacaccaaagtatatggaattgccgaaacccaagagggaattcatatagcatctgcacaccaggctctacaaaatagcgagcggatccttcataatatatataagaatcttccggtaggcatcgaattatatgataaggacggtcaaatggtcgacctgaataaaaaagatatggaaatgttccgtatttccaataaagaagatattttgggagtcaacattttcgagaatcctatattgccggaagagataaaacagaaaataaaagacaatgagaacgcagattttacattccggtacgacttttccaaaatcaacaaatattatcagcctaacagtacaaccggtttcattgacttaacaaccaaagtcaccactctatacgatcacaatcacgaacctatcaactacctcttaattaatgtagacaagaccgaagatacaattgcttataataagattcaggaattcgagagttttttcgacctggtaggagattatgccaaagtaggttacgcgcacttcgatgctttgagtcgggatgggtatgctttgagaagctggtacaggaatgtaggtgaagaagagggtaccccattgccggaaatcatcggcattcattcccatttccatccagaagatcgggctgtgatgatcgacttcctggataaagtgataaaaggagaaagttccaagctatcccgcgatgtccggattcgcagagcagatggaaattacacttggacacgggttaacgtattagtaaggaattaccagccccaggacaatatcatcgaaatgctgtgtatcaactttgatattaccgaactgaaagagacagagcggatgctgattggcgccaaagagaaagctgaagaagccgaccggctaaaatctgcttttcttgcgaatatgagtcatgagatacgtaccccgctcaatgcgatagtaggcttttccagtttgcttgaggaagcggaggatgcagaagaaaaacatctgtatgcaacgattattgaagaaaacaacaagctcttgttacaactgatctcggatattcttgacttgtcaaagattgaggcagggactttcgacattatcccggaacaagtggatgcacaacaactttgcaacgaactgctacaatctatgcaggtaagggctacagagcaagtagagattctcttagcaccggaactgcccgagcttacttttaccagcgacaaaaacaggttgtatcaggtattgctgaattttgtaacgaatgctctgaaatttacttccgagggcagtattgttattgattaccgaatcaacggaaatgaagtcagattctcggttcaagatacgggaatgggcatcgaaccggaaaagcaggaagctatctttacccgattcgtgaaattgaataattttattgccggcacagggctgggactccctatctgtcaaagtatcgtcacacagttaggcggcaaaatcggagtggaatcagaaccggggaaaggttcttgtttctggtttacgcatccgattaactaaaatctaaattcaaaataaatatcagaaaacaatgtttaccggtttctctttaagaaaatacgatctgttatagtgttgggaagttccgattcataatgtgtcaccataatcatcgtcttatctttgcgtcggcagaaagcctcaatcactttctttacccgtcgacgattataagtatccaagccatgaagcggttcatccagaatcagcagttccgggtctttgacgaaagctcttgccaacaaggacaaacgttgttctccactggatagttgcaggaatggtttatctttcaaatctgcaatgccaaatatatccatccaccactcacagatagccatctgttccggttgaggacgtttatacagaccgatactgtcatgcaaaccactggctacaatctcaatagcgggcagatttttaagataagcacggtgcatctccggacttacgtaaccaatatgtttcttgatttcccaaatactttctcccgtccctcttttccgtccgaagagactgatgtcacaggcatacgattgcggattgtctgcacagacaaggctcaacagagtcgatttcccagcaccgttctcaccactcaacgcccacttctcaccacgacggactgtccagtccagttctttcagaatagttcggtcgccataacggatactgaccttattaagttttactacttcctccgaatcgtaattgttgccatcagatgacaaatctataatccgttgctgcaaatcatcaaaagaggtaaccacatctctactgcggaaagcttccagataggcttcacgttccattttaggaaagacctccattttgtccacaggaatgacatgagtgatgaatgaaggtatatcatcgagcatggaaagtaccagaatgatctgtacggacgacatttttgtcagacgttcgagcaaagaaaacaacagttcacgcgtaggagcatccagtccgataaacggattatccataatcaacacgcggggagcagtcaacagggttttggttagctggaatttacgtaattcaccgctggaaaggagaatgattttcttgtcgagcaacggttcgatacggaaaagttcaaacagttcgcgttgtagttgctcgtccttgatttctcccaacatctcacgaacatcaggagcttcatcctgatcgtaagcattccaacgctgctggtagtagtaattggcatcggcagctccataggtatcacggaaagcaatgtatttcacattatcataaagagtctgggtggcagagggggaaaaatcatattgtacggttccttcacgcaatggatattttccgatcagggtatctacaaaaagacttttaccgccaccattgggacctacaatagctatgtgttcattcgctccgatagttgccgtgatgggtttggctaaacgcacaagcgggttgcgtgctacgccccccgccatgcagaatgtattttggttcatattcttttattctgttttattattgcccgcaaaggtaacaattttatcataaaagacgccaaattgcaaacatattcttattcgttccgtagaaggaatatctttatttacttactaaacccataaggtggacattcaaaattggtaatatccaatttgtattccatcatatctttcaactcgtgtatgggacgttccaattcgtaaggtatcgattgtctgctgaattgctggaagtaaagcaaacaagcatcccgccaccagacagcatcccgtgcctgaatcttcaggcggtgttgcacatcacgaaaacgttcggaatcaatatacggttccatcctgtcccacactttttgaaagtttctcacttcgtttacaccacgatcatacgcgtagcacagttctgcccaaagtgtacgtccgctcttcatctgatgattccaagggacatggtgaaaccaaaggagcagattctccggacaagtattcacattgtccagttgctcgcataatggagaatggtattgtccggtagcattacttcctgtactgctgcggtcgaaacctattcccatgttgtcggcacggtggtaataaggaggcagccaatccgggcgggcatcgggaatatcacaccagggttccggtccgtaatgatgtccccatgcaaagatatgatgcaagccgagaggcatcatgtagtctactactgcttctctcgatttttgaagcacttggaagttgagaagggagagttcagcgtcgacctgctctttttgaatgacttctcctgccggagtatcggtttgcgcaccggtaacgggaagaaaagtttgtttcaaccattcttctcctatctgttcggaagagagcgaatgtttccatgccaatcgtccgaaagcataccagttggcttgagcaaaaggatgtccacaccaattagtatcatcaccgatgtttgccactccggaaatagccgtgagcggatgaaagaataaagaaccatctgtcacacgggcaacggtagagcctttgccttgcagataagtatcactgtctaaacactctttccacataggagcaaggaatgcaagatgattggaaaaaccaagatactcttgtgtgatttgaaattcgggcataactgccgtctttttcatggctccgaacagcgggctgaatggttcacggggttggaaatctatcggaccgttcttgatctgcacaataacattatcccgaaatttatcatccaaaggttcaaattcaagataggcttgtttggcacggtcgctgtcggtaggagaataaacgaaagcgcgccacatcacaatgccatgataggacctcaacacatcggcaaacatattggctccttcggcatgagtccgtccgtagtcacacggaccgggctgcccttcggaattcgctttcaccagaaaacctccgaaatcgggaatcagagaataaatctctttggctttctgcttccaccagtttatcacttctttattcaacggatcggaagtggataaaccgcctaaagctgcgggagaagagaaattgatagaaagatatattttcaagccataagggcggaaaacgtcggccaagactttgactttctgcaaataatcattagatagtatcttaggacttgcattgacattgtttattacagtggcattaatgccgatagaagcattggcacgagcgtaggcttcataacggggagagacaacagacggaagttcgtcccatttccaaagtgaatgtccggcatatccgcgttcgattgtaccatccaagttatcccaatgattcaggatacgaattcgataatcaggtcgttcggagatattgagggattgcaaagctgattccggtagttgtccggtagcttgcagacggagtaaatgatacgttccataaagtactccttgttcaccggaagaagctatcgttatttgactgccacctttggaggtctgaatcgtatatccctcatttccaagtgcacgaagttctttattgttccggacctccaaagtaaccgggattcctccctgccagaagttctgtaattcggaaaccgcaatacgtaatgtaggtgattgtttcttgctggtaatttccgctttcgctcccgatgcataacgaagccacaaggcacttccatcttctgcccaaatagaagaaaagcaaaaaaggatagtgaatatcaatgcaaatatatttctaggcatatttttcagatagaagcggtagttttaatgtattctattattcatcttttccctcgatagtaatgattcgcccgtctgcatcatactgaagttcacagacttttaggctacggagccaagtctttccctctgatggtacacaatcgtgatgaaacagataccacttacctttaaactctacaatagcatggtgagtagtccatcctaccaccggagtcagaatgactccctgataagtaaacggaccataagggttatcacctgttgcatagcagagcaaatgagtgtctcccgtagaataggaaaaatagtatttaccattatatttatgcatccacgaagcttcgaagaaacggcgttccgtatcccctgctgtcaatggcttaccgtcttcatccagaattaccactgcacggggttcttcggcaaactccatcatgtcttcactcaaacgagcaacacgcgacgggattgcctcctcctctccttccggcaaaatggcagattccaaggctttattattacggtaacgttgaagttgtccaccccacaatccaccgaaatacatataatagttaccatctccgtcatcccatacagccggatcgatgctgtaacttcccttcatcggattagcttccggtataaaaggaccataaggtttatcactcacagctaccccgatacgaaatatatcattctgatctttcaatggaaaatacatatagtacttaccatctttacaaaccacatcacaatcccatagttgacggcccgcccaaggaatatcctctgtggaaagcaccactccatgatcttttatttcaccgttcatcacatcatccatagaatacacgtgataatctttcatattgaaatgatcgccattatcattttcagcaataccactttcccaatcgtgcgagggataaatatacagtttgccatcaaatacatgtacggcagggtcagccatataatcactgggaactaaatatcttttttctgttttcatgctttttcggtttttctgttagaaacttattttgttttttcagcctctttgataatcaggtcgactaccggcttcggctgataattgcgatcaaaaagtaacggataatccgtgcggcctctcatcggccagtcattacgccaagagttctgatcggctactccccaaagagtaaccctggtgataaggttatgatgtttcaggaacagacggaaaaagtcattcattctttcagtccatgctttcgatacctcttccggtaatccatccggataaggattcatctctttcttatattcaaaggaagcggaaacttctgcacctacattgggattcggtgatggtatcaccgtcaaatccagttctgttatcattatcttcactcctgttccggcaaaggccagcatactcttctcaaattcactgattttcgggtagtccatgccgatgtgtccttgcatacctatggcatcaatacggattccacgttttttcaaatcgttcaccattttcacgacggcttctcttctccccggttgggtcattgagtagtcattgtagtaaagttcggcatccggatcggcctcgtgtgcatattggaaagccaataggatatattcttcccccagaatctcataaaactttgtcttgcgatatgctccattatcttcaatcgcttcatttactacatcccagcctttgatacggcctttatagcgtttcacgatggtagtgatatggtctttcatccgtttcttcaggacttccggagaaacattattcccgtccttatctacgcaaaaccaaggagccaattgtgaatgccaaatcaggcagtgaccaatgatagccatttgattgctctcaccaaaactgacaaattcatctgcctgcgcaaaattatacttattttctttcggatgaatgacagaagacttcatgcagttttccgccacgatggaattaaaattcttctttacaatttcaacagctgcgacatccttaccggaactttgatgtgtgttcactgacacgccaatcaaaaacttgtttttcaaagcctttttcagcgaatttccatctttcgcaaaaacttctccataagaaaaagaaaacatcactgtcaataataacagaattattcgtttgagtttcatacgttatatttttgagtaataaacattctactatcttatctattcgccttttttacagcgcgattctatctcctcatttatattgtcaatcacattatcttccaattcatatttagaaataatgaacatagcgaccaaaagcaacaacgccggaataacggctacgagccacagtattccctgttcggcaaaaggtgattgtgacacttcatttgtctggtcgaatccgacaaaagccataacaagtcccggtacaactcctccaagagccattcccgctttatagaaaataccagtcaaagcattgactatacccgaaatacgtttaccatgagtatattcgccatacgaaattacttcaggaaccaaagcccacatataccctgtcgcaataatgactcccgtcgattttatgaactgcgccacaaagaccaaccatatctgcgttttgagtaccggaaccacagaaataatatacagcaatgccatacccaatatagcgactgaaaggaatacataaaacatttgcttttttccaatggcacgtttaatggcaggtaccatcggcatgaaaatgaatgcgggtatcgagcccaaggccatgaaataaggtaacatctccggtgcacgtacattataaatcatataatatgaaccggcagaattaccaatcgccatcattgcaaaagcagtaatgaaaaagaacgccaaaatacgcaaaggtttatttctacaaaattctacccacaagtcggacacttttactttagatgtctcctcctgatccataaccacacgctccttcgtctggctaaagcagaacatcaataacgccaatccgataacagcataaatagtcatcgtaataaaccatgcgttagcagatgcagtagtattgattttaccatcgggagacaacaccttcaccagtatcggaataccgtatgccacagccaaaccacccaaattggcaagaaacatacgcactgacgtcaacaccgtgatttcattcgtatcgcgggtaagtgacgcattcagtgctccataaggcacattaatcaatgtataacacatggataatccaacgtaagtgaaataggcatagaacagtgaacccgaaaagccgttccaaaaacaaagaatagcaaaaccagtcagcggaattcctccccaaataagatatgaacggtatttacctagtttaggattgtgtttatcgacgaaagcacccaccagaggatcccaaaggacatccactatcctgacaataagaaacatcacggctgccacttccggtttaagtccatatacattggtataaaaaatcagcagatacatacatacggtctggtaaataaggttttgcgccaaatcaccggaaccgaatcctatacgttgaagccaagagagtttatagaaacctttcgcttcattggtctttattgtattctccataaaatagataaattggtcattttctgtttttcgtattcatttctatcaagatagctgctgccactcgttgccctagcgtctttttatccaatggatgaatatcattccattctcctaaatcactatttttaatcagagtaacatttttatttgtatcggctacttccgcctgcgctttccggaattccgcccaggcagtgcgtcctcctttatctgtgggtgaaaggaaatccgccagctcaatgatatagaaaggcatatccgacttattccatcgttgtctccaatcgctaatcatagccgtcaacaagtctttatactcatttctgcgtgagacattcgattctccctgataccagatgacaccggataccgtatagttcagcaaaggagcaatcattgcattatacagtcctgtgggtttataatgaaaagccgtttgtcccggagcagcgggcataggagcaccgagatgatatttccaactcccctccaaattgatctccgattctcctttttccggctgaccttttccgaaaaggattttataaggcttttcctttacaaattgaggacgaccgccataactgaaaaggcgtatggttattgtattttttccggctttcaacaatccggcaggaatggtgtagatacggggaggatactgataagagacagtccccacaaatgtgccatttacatagaccgaatctgcatctacgatgcatcccaaacgaagagtcgctttctctcccgcctgttgtgcagacacctgaaagtctttacggaaccagtgggagccattgacggtattcagtccgtttgttgcccagccggaagtaaacaaatctgtttctgtccaattgctatcatcataatcggcagcataccaaggggtagcctcatgcatccctttatctccctgaaacaacgccacattccaggcatgacttttcttcctctcctcttttttcatcgactccatcaaatcgtctgactcatagatacgcttttcattcaaataaaatggaaaaggcttcaaccctccctcactgatccacgcttctaccggtgaacctccgacactggaatttatgattcctaccggaacctttgtcttttgatagacatctttagcgaagaaataggctaaagcagagaaaggcatcacattttcaggagtcatcgcttgccaggaaattcccggaatatctgcctgcggagcatgaaaattatagagcagaggtgtttttatatagcgtaccatcggatagttactgtccgtagatatttcatcgcgaaaacgatctgtaacccgtgaaacaggcaattccatattcgactgtcccgaacatacccaaacatcaccaataagaatatcctttaattcgatatcattaatggccatcgtataaggtccgccagctttcaatataggcaaagtcactttccagttaccttgtacatcagcaacagtcttatatttctttttcaggaaagttatatcaacggtttcatcaggatcagccgttccccagatattgacaggttccccacgctgaagtaccattccgtcggaaacaagagtcggaagtttaacctttgctccgcccaacaaggcgaagcaaaggaacacaactactaaccctaccttataaaaccaatacttattcattctgtcttttcttttatatgtctttatttcatgataatttagcaagagaagaaatccatcgggattccactttgcaaacttaggaagtttcttcccacttacccagaaattctgattcaaatcattactcgcttgttacatcatcgtttacgtatgttacaaaaacttgttgcaatgttacattcaagctgaaaccaccgatgaacaggaggaaaacgaaagttttagaaagagcggattacagtagttattgttattcattcgatccgctccaggatgataacaactactgtaaccctcactctccccctctttaattattataattccaaatctccggtaaagtcttcgctgacatccttaccagccaaaccatcggctactcccttataagcatgtttacgtgcataattagcatcccaaaggttcggagcgtcattcggtatccaattcacatgttctttttcattgtccgatactccccagatggtaataccatattgtttatccaccggaatatacttcttgtacatatcaataacatactgatacatttctgcctgttgtgccagattttcagtagtaggcgacgaggtgttaaccttaatatccaactcggatactttaatcaacttgccggtagcacccagtttctggaacatttgagcaatattgtctttattggaatcaatagcaatatgcatttgtgtaccaataccatccactatggcccctttgctttcgatgtattccacatatttaatcagaccgtcacacttattgaggttatattccagattataatcattgatgaatagtttatcatccggatttccatactgacgggcaagtttgaaagcttctactgcatagtctttcggagtcaggaaataatcttgccagtagaattcatcagaagccagatcagttttgcctttaccagtcttaatgtctgatgtttttccgtcatccattggttcattgactacgtcccatgcatgaacataaggtttgcaatgggtaaccatctttgaaatccagtcttccatagcatctctgataatctcggctttttcttcgtcggtcttctcaatgatagtaggaccggaagcacgagtgacagcacgtgtctccaccactttctccgacaatacgatattatctatataataatcacccgcactaactccgaaattgatacagaatcgattcatatcctctttagacactgtaaattctttcttaaattctgtccaagtcgtactcacatttccatctacatagcattcacctgcataactcgttgagttctgaatttgaatttggaaagtagttgagacacttgctttaatcatagcagagaactcataggtcttgccgacttccaaaggagtatcaaagccatatccagcctgtgccttatatgcattgcccgcccctccgtcaacagaactagtcagcttcatcgaatatgaacttccatatccttcaccttcttccgaaatcgcggcttttccactactccaagctccccaaggagtaatagctttgctttcaaaatctccgttagaaatcagattaaccacagtaggatcggcatctttgtctgtcacaacaatattatctacataataagtcacatccggcaaataaccaaattcaaatgcaatctgaaatgtagtactaacaaaatcattcactgtgatcttcacctgctgccattgagacgttgtctcaaaagcttccgtccaactgccacctgtagcataccagtctttatatggataattatttcctaacccagcgaaagtcaaccgggctttaccagctttatccgaacggacaaaaaatgaaatttcataattatgcccacttactgctgaaatgtcaggagtatataattgcacagaatgagcagccgttacagaagatcctactgtaaatttcaatgctttggaagtagttgtcagtccttccccttccacaatggacatcgcatcacttccatttttacgattccagccatcaaaggttccatcttcaatgcctgacagatccaacaaattactgcccgccggtcccggaataacttccggtgcaatcagactattcagataactcgcattctgattagtgtgccaaatcagacagtgtccataaatgcttatacccgcttctgtagtctttgtaaacaattgatctaccttatcaaatttcaaattccctttagaatcgaccataggaccgtgcttcatggcatatcctatcgtcagatcattaaagttctcattcacaatggtagtcgttgtctcgtcaccaagatattcatccatccccactccgatacccaacttaaagttgggatcggataaatattctttcaacggcttgtaacgggaaatcttttcagccaactgtaaaggcagttcggaagaagtaaccgctccatgtgtagggtctttataccactccatcttattatcgtcacacgatgtcaatatcagcaccgacaaggcaacaaacggaagcatatttctgtatttcataatcttttcaatttaaagtcattattattctgcatcctcttcttcatccgggaaatcggtatattccggcttcgtcaaaggtacgacacgccagttatcaatataaatcttcacggaagttgttttggatagaaactctgtttctttatccgagctcgcacctgtgatcttatccaatgtaatatcagagttctcaaaatagaaaccgaagttggcataagaagcagatgcacgggtagcggccacatcggcaaaagtggtccaagctccgctggatgctttcgatttgtagaattcactgaacggaacagttacagtctgccaaccggttgtctggaaaggaacgatctttccgcctacaagccacggtacgtaattataacagtctctctcccattctccaccattgaatccgttctgaccacaaatcttcaggaatccggattcagaccaaggttcgggcacataaatttcaaactgaatagcacattcggcaacaggagtttcagcagggacacccagcgtcaaccagtcaggatcagtgccattaccagctgtccaaacttcagcacaacgattcttcgctgctgccaccggcaactgtctttctaatggcaaacgacagtaagcaccttgcgacacattaccttcaccaatcgaagcagattccagttcggttgtttgaatcatactttcagaatcgccccatgctccttgtgcacccactccgtcgaagttcaacaacaagcctttcttataattgaaataggcaggagaataagcaccaccattcgaaccttctacgaaaatagaaccgccctcttcagaaactccggcaggcatatccaccataaaatattcaccgtcaagatcagaaataataccttctgtcaccaccacatttccggggaaaacgacttttgctatttccgtcaatccacttccgtaaacaatgataggttcacctatattcggcatacagttggagattttcgttatagacggtgcagcagcacgaatctggaaatcataaacgtattcaccgccatcttttaccaaacgaattgtattacgtacattctcgtctgcttctgtagtcggaactttactgttcacactaaccagaaaagatttattcgaaacaaataccggattaaaataacagttatatccattaatatacactttcttcaatccgttgaatccttcaccttcaattcggatcagttgtcccaaacgggcaaaatcaaccaaacggtcaggaacattcgacttcgcgtcttccagatagatccctgttatgttcatcacagaacttccgccattatcgtcatcgtcgtcacacgaaacaaatgaacaagagcagatgagcaggctcaccaataagccaaatgctttcatactatttttatatatcaagcttttcattcgtattctcgtttttaattaaacaaatcagttattctgtcttccttaaatgcataaggcacaggatctgctttcaacaaaggattttgcacagtctccgattccggataaggaagaaggaatatactggaatcgacgtcacctatggcacgcttcgtttcatccgaatcctcgtctctcttcaaagtctgtgtatccgcatcccatactacaggaatagcagtacccctatcctgtccggtgatataattgagtacttcctgttgtttataataagctctacgtaccaagtcataccaatactgtccttccagacaaagttccagtctacgctcacgacgaatatcttcgtaagtaatcgaattttggggttccaaaccggcacgcttgcgcactttgttaaagtattccattgcatcggcatcatctgttgaaggattatttcccaatatagcttctgcataaatcagatatacttctgccagacgcaacatgtaagtattgataggagtacttccggaagtgatcttcgcattatctttgctagaaccacaaacatatttcttacaataaattccggaaacagtacccgatgctttcttctcacaagtatatcctccgtttgctttctgtatttcaggataatgatcgccataagccatccaagtcggctgacgccgtttatctcctttttcatactcccaaatcacgtccggttgtgcaaaaacataaccgccccatgcacggtcattaccggtaatagccgactcacaagcaaaatagtcctgtatcgtattacattccccatacgtaccattactaacccattgtaaagcaaatagtgtttccgagttgttatttttatcaatcataaacaaatcggcataatcagtcatcagttcaaaatttctgttttctatcacttttaaagccgctttctttgccaaatccagatagtcctgattacgggtcgcactattagggttactactataaccggcatacgtcagataaacacgcgacaacatgccaaaggcactgtatttattgacacgtccggcagcagaagaaacctccggcaaatattttgccgcaaattccaagtcacgcatcgcaaattcatagacatcacttaccgggctagtattgacaattggattagccaccagttcatccgtatcctcatttataataacatttccccataacatcgccagataggaataagcaactccacgcatgaaccgtgcttcagcaatatatgggttcttcacttcttcgctattggatgagttacctttgatcccgttaataatcttattagtttgctgtactatattgtataatgagccccaagccgaaactaacggccccgtcaatccggtttcggtcaaatcggcaaaaggatagatataattagaggttgtcgcacaaaggttgaatccgcgtccatcacccagtccataatagaacttatcgttaaagtcgaaccacaccttattatacaaaggagctgttgctgcccggaaatcatcttccgtttgataaaagttatctcctgcgatattggagttatcttcagaatcgaggaagtcactgcatcctgcaaacgccaaagctacagccaacatgaaagagtatatatatttacttgttttcatatttagtcactttaaatgattaaaaggttaaattcagaccgaatgtataaattcgcggagaaggataacgatagttatcaaagcctgtaagcaaagcgtcctgattggcagaacctatttccgggtccatccctttgtattttgtgaatgtatatacattctgcaggttacaataaagtttcagattctgaataccaatcggtgccaaccatttacgcgggaacgtatagccgaaagagatagactgaatacgcaggaaagaaccatcttccacaaagcggtcactgaaacgataattggaatcatctgtccctttggcaatagccatacggcaagcataagggtcaccgcctacaatctgtatattccgataatcatccggaccattcggatcaatcaaagccagttgtgcataatccaacgccgatttcaggatattattattgccccgtggattttcaagttcacgacgcccccagtttacaacttcatttcccaccgatccggtcaggttaatgctcaagtcgaagcctttataagagaaagagttaccgaagccgaaagtaaagtccggttcaggattaccgatataagtacggtcctgttcattgataacaccgtctttgtttacatcttcaaaaatataatcaccaatccagatactattcttggaaatcgacataccttcaggcaatgctaccggcttaattgctccggaagcatctttatagtaaaagtcagtagccttttcaaagcggccaatcactttataaccataaaactgtccgatagggtttcctactgatgtacgtgtcagtacggttattgtttcgcctgtctgattactcttatctatcaggctggttgccgtatccagcgattttactttattacggttcatagagaataccacgttacttctccattgaaatccgcctttatcaatattcactgtatttaaagtcaactcaagtcctttattctccaaagaacccacattcttccagggtgcggaagtagagccctgacctgaagttcccacgtaagcaggaagaggcacttgcaacaacaaatcatttgttttcttataataaatatcggctatcaattcaatcctgttctggaaaagattaatatcaagtcccagattacttgaataagtagactcccatttcaattcgggattcggagtattgccagccagcaatcctgttccccaaacggtagcaacagatgaataaatggctttatatgcattattaggcacattctgattacctacaacaccccatcctaaacgcaatttcagattattaataatattgttgtctttcaaaaaagattcattggaaaccttccaagccaaagcagccgacgggaaccatccccaacgattatctttgtagaatttggaagaaccgtcgcgacgaagagtaaatgtcaacagatatttgtcatcgtatgaatagaacagacggccgaaataagataaaatcgaactttctccactattaccattattcttggctgttgcggcatctcccaatgtcaggtcggttgcagcattggacaaatatcccatacggcttcccatcagatattcccatttgctctcctgcatttcctggccaatcattgcattcacattgtgcactccaaaagttttcatgtaattcacgatatttctccaactccagaacttattatatgatttggagaaagtcccctgacggtccgtattttcaatcgcaccaaaagtatatgagggatcaaatttataagtattagttaccccataatcgaaagacaattccgttttaaacgtcagtccgtcaatgatagtagcttcagcataggtgtttgcccgaatacccattttctcgttgcggttatccttaatcatggcaagacccaccggattcgtttgtacccattcgtccgtatccggtccgtcaaatgtgccttcagcattacgaacagccacactcggactctgcaataaagcagttctaatcaacgactcgtcagatacagtcaatttctgacgggaattactaaacgcaaagttaatacccatttttaaatagctcttcacctgggcatcaaaactacctcgtaagttcagacgcctgaaccctgaaccaacagcaataccatcctgattgaggtaacctgctcccaatgcatagttacttttatcagtacctccggtcacagaaagattatgactggtcatcatagctttagagaacatctcatcctgccagtctgtaccctcacctagtaaatccggacgaacaaagttattatccttgttcactattccccaatcatttcccgaatagtcttttcctgaacgaacattcttatgctccgcatattcacgcagattcagcatatccagttttttaggcatttcctgccatcctatatatccgtcataagttatttgcgcctcacccttctgtccacgtttggtagtaatcataatcacaccgtttgcagctcgcgcaccataaatagcagtggcggaagcatcctttaatacgtccatagagacgatgtccgaaggattgatagatgccagtgcattatcacttcccgaacctgtggaaccgtcgatgataacaccgtcaatgacaaagataggttcattggaggcattcaaagagttgataccacgaatacggatggaagaactaccaccgggcataccgctattagcctgtacctgcacaccagcagcacgtccttgcagtacctggtcaacggaagtcactacagatttcttaatggcttcatcgttgaccgatacaacagaaccggtcaggtcactacgtttcatctgaccatatccaactacaactacttcgtctaatacttttgcatcttctttgagggtaatatcaaactgctttttcccggctacaggaatcgtttgtgtctgatatccgataaaagaaatcttcaagctacctttggctgatacattcaacttaaaattaccatccaaatcggtaactataccattggtagtgccagcttctactacactggctccgataatcggttcgcccgatgcatctttgaccatccccgtcacggaaacagtctgtgccaatacccatacagggaagaggcagaaaagaatgataagacctaacggtcgaaaataatgatttgtgctttccataaaatcatttttttaattaataatgatagtggttaatccaagttataggtttttctcttcttatttataataaggaatagagtaaggaattcatgtttccataagcagttattattttaaggtgtccgacaattcatttttttggttaatgcaaatttatggataatatatcaagcataggtggagattttgtttcaagcaattgacaggcggttacatacacttgcatgtacgttacaagctattgcacacccgttacatacccctcccagaagcatccctaaagggtttgcacgtaacatcagtaaaaggaaaagtaacaaagctaatgctattttaatttaatatagtatctttgtctatataaaaagcaccaataaaccctgcttatattaatgagtatgaaagcacaaatcctattccttttttccatatactatttcctgataggaagcactcctgttatgaaagcacagaccggcaaattctattcaacagacaaagaactttccaacagtctgatcaatgccgtatatcaggaccggaaaggatttatctggatagctaccgaaaacggacttaataaattcgacgggacacgtttctcgatctatcgacataatgctacggatagcaccagtttgaaaaacaactatgtacggacattattcgaagacagtcgcggtaatttctggatcggatgcatcaatggcttacagcgatatgaccgcgccacagacaactttcacgaattattcatctctcggaaagacggacgaaagaatcctcatatcacttccattattgaacgccggaacggagatctttggatagcaacttccggacaaggcgccatatccctaaaaaagaacagcaatcccgcctccttccatatcgaaaccgaactgacagaccggataggtagtaactacctgaatgtcattttcgaagattcccggcaaaatttatggattgctacagaagaaaaaggactttaccgttattctccggaaaataaagagcttaaaagctataaagcaccttatcatatagcaggtgatgacgtttctgccatttgtgaggatgcacacggacaaattttcgtaggaaccttgacaaaaggtcttttcagactatcatcccgacaggaaggaaacttcgaacctgtcctctaccaaaaccggatgaatttgaatatccggactctcatcattgatacccgtggaaaacttatcataggaacagacggtgaaggagtaaaagaatatcagcctcaacaagatattattgtggacagtgagattaatgcgggtccctttgacttctccaaatccaaggttcactcgttaatcgaagataaagatcacaatttatggctgggcatttttcagaaaggtttgatactagtgcccggcatttcaaataagttcgactactacggctacaaatcaatacacaacaacaccattggttccagctgtgttatggctattcatacagatgaacaagctacaatctggataggtacggataacgacggattatatgccataaacgatcagggaaaacaattacgccattacacccatcaggcaggtaatccccaatctgtccccggcactatcctatgtctctatgaagattccaatcaggaactttggctaggatcttacttcaatggtctggcacggatgaacaaacaaaccggaacatgtcaagatgccacctcgcttttacaaggaaatcttaacgcaggcaagcccaaagtttcctgcatcattgaagacaaaaacaagaatctctgggtgggtacttatggttcgggcttatacaaaatcaatttaccaactcaacatgtcacctattacgaatctacccgcaacgaaaacgatgactggagcatcaaccgacttccaaacgattggatcagctacctactggaagatagagagggaatgatatggatcggcacttataaaggtctggccgtactcaatcctcaaacggacaattttatcaattataaaaagcaaaacaatctcctccccgggtatgtcgtttacagtttattggaaagtagtaatggagagatctgggctggtacttccgaaggattggtctgcctgaataaagacagactaacacctgtacttttcactactgccgatggactccccagtgatattatttgcggcctggctgaagacgagaaaaaaaatatatggatcagtacccatcagggaatctccaaactgaatcctccggaaaagaagtttatcaactattatgcaggcgacggtctgcaaggaaatgagtttacgcgcactgctgtatttaaagataaacgcggcaagatattttttggaggtaccaatggagtaacagctttctacccccaggatatcaccgaaatcaaaaaagaaatgaatgtattgattaccggctttcacgttgctaaccgccctgtgaaaaaaggggataaatccggcaacaatgtcatcactgatactgctgtcatggataccgagcaatttacactggcatataatgaaaatacattcagcattgatttttctgttttggaattcagcaatcccgaccggattagttatcaatataagataaaagaattaggcgatgaatggatcagtacgcaaccgggaacaaaccgggtgacttatagcagtctgaaaccggggaaatacactttctccgtacaggcacgcgaccataataatttctctaatatccgcacagttactattgccatcactccaccctggtaccagacctggtgggcaaaagtaatctggggatgcctcggagcattactaatctatgctcttaccatgtatattctgtcacgtatccgccaccggcaagaagtgatgcgacaaaaacacatggaacagattaacgaagccaaattacaattcttcattaatatctcacatgaaatacgtaccccgatgactcttatcatcagcccgttagagaaactgttagccgaacattccgagaaacaaccggtttatctcatgatttaccggaatgcccaacgtattctacgtctgatcaatcaactgatggacatacgaaaactggacaaaggacaaatgcatctgaaattccgggaaacagacatcgtaggatttatcaatgacttgatgcaaacattcaattatcaagcgcaaaaaaagaacatcacatttactttcgaaaaagaactggaaggtgctgattctctgaaagtatggattgatctaaataactttgacaaagtattgatgaatgtcctttccaatgctttcaaatatacacatgagggaggaaatatcgaagtgtcattgaaaaccggtcacaacgatgcctaccggagtgctttgaaagattatttcgagatagatatcaccgataacggaatcggtattgacaaaaacaaaatagaacaaatattcgaacgtttctatcagattgacaacgacatgacacaatctaatttcggtacaggaatcggactgcatctttcacggtcgttagtggaactgcaccacggcatcatcaaagcagaaaaccgcgaagacggacaaggaacccgtttcatcatccgcctgccgttaggtagtaatcacttgaaagcagaagaactggaaaatcctgaagaaaccggaagcgaaccaacaatctcccaacttcccaaagattcgatctatgaaacggaagaagaaaacaaaactaacgagtacaggaaacccaaagcaaaaacacgttatcgcgtcttaatcgtagaagatgatgaagaaatacgccgctacatacgtagcgaactggatagtgatttccgtatctatgaatgtacaaatggacgggaaggactggaaaccattttgaaggagaaacccgatctcgtcatcagtgatgttatgatgcccgaaatggatgggatcactctctgccggaaaataaaacagaatatcaatatcaatcatataccgattatattattaaccgccaaatcgaaagccgaagaccaaatcgaagggcttgaaattggagcagatgcttatatcgtaaaaccattcaacactgaattattacgaactactatcagtaatctgatagccaatcgggaaagactgcgcggcaaactggtaggtgaacaacaagtagaagaaaaaataacaaagatagaaatgaagtccaatgatgagatcttgatgagtaaagtaatgaaaaccatcaatgaccatcttgccgaccctacccttaatgtagagatgctggcagccaacgttggaatgagccgcgtacatatgcaccgcaaattaaaggagttgactaatcagtcagcacgagatttcattcgttctatcagactgaaacaagctgccaatctgctacgtgagaagaatctaagcgtttcggaagttgcatacgctacaggcttctccaacctctctcatttttccaatacattcagagacttttacggaatttcaccgagtgaatataaagaacaacagatgtaacaaacagaattagacttgttacaaacaagaatctaaattagaaagaaagccgttattgatatgacaaataatgactaaagctacttatacataatcaatgcagactgtccgggaataattacttccggtccgatctgcgtacctaatccacgcacatctatcacaccatctttgcataccactgtatatttaccaacaggcacttccaaacgcgcaggagtcatacgggaattaaaagccacgataatatcttcccaactatctccgttcgcatgatccttcaggcggaatgcaatcaggttttgtccttccaccggaagaaactccagatgcttccgaaccttttccgcatctcccatacggaaagcgggatgggacttacgcagatctatgagtcgcttataatacatgaaaacatctccgttcgtcgttttacgtcgccaatcgatagcattgactgcatccggactcttataactattatccaccccttgtttatcgcgcatcacttcttctcccgcatagataaaaggaataccttgcgaagtgaagactaccgtctgcgcaagcttatcaagccggaccagttgctcgggagtaacgcccggcatacttgctttcaagcgatcaacaaggcacaaaccgtcatggcaggaaacgtagctaatcatctgggtaggctgctccgcccacggtttctgactataattaacagaatcacaccgtacttgcggatgctcaatagcacccacaattccgaatttaacactcatttctgctcccggaactccggcgaggaaagcccctttctcctttttccacacaggtccgcaaagcccatcacgcaattcatccgagaatacggcaattcccggcatgtgggaaacattccctttcattgccaacgaatctgccggatattggggagtgtcggctgcccaaccttctccataaatacaaatggtaggatcaaccttgttcaccgctttccggatctcattcatggtttcaatatcatgcactcccatcaagtcaaaacggaaaccgtcaatatgatattcttttatccaataaagaacggactctatcataaacttgcgcatcatagggcgttcacttgccgtctcattaccgcatccggaaccatttgccaatgtcccgtcttctttctgacgataaaaataaccgggaacagtacgttcaaaattactttcaacggtattaaaagtatgattataaaccatatccattatcacacggataccagctctatgcagtgcttgtaccatttgtttgaactctttcacacgagtggcaggttgataagggtcagttgaataagagccatccggcacattataattcgccggatcatatccccagttatagtggttttcttccagttttgtttcgtcgatagaagcataatcagaagaaggaagaagatgtacatgtgtcactcccagttctatcaagtgatcgataccggtcaataacttatctgaattcatggtcccgtgttcagtcaatgcgaggtatttacctttattcttaattcccgaagtagaatcaaccgagaagtcacgatgatgcatttcatagataatcatatcagcaggagatttcagagaaggacgtctgtcactctcccatccctcgggatttgtagtcttccagtcaataatggcagcacgtttcccattcactccgacagcatgggcattgattcccggcgtgtctccctgccatttatcattgatttttacattgaaggcatagaatttgccaagcaggttctcatctactgaagttgtccaggttccatcttctgtgggctccatctttactgtttcataagcatgtccgccttcaccggcatcatatagcatcaggcgtacttcttctgcagttggtgaccaaagataaaatttggttgccaacggcgtatattccatttccgtaagacttcccgtacgaaccggatacagctcaaaagaagcatattcctttttcgcaggggagcagctcattactgttgtcactgtagtcacccctaatattgctaaataattacttcccatcttcatttaaacctcccctagatatttcctttatatctatccctataatcagtcgctttacttcaccttatccggattcttcgctataaaatccttccagctattataacctttttccatggtcggccgccccatttgcaggaaatgacaataggctgctgccaatccgtctgttgcatccataaaagtaggcatatcctctttgggaaagcgcaacatccgctgcaacatatccgctacctgttctttggatgcctgcccgtttccggtgatagccatctttatcttcaaaggagcatattccgtaatcggaatgtcccggctcaacgccactgccatcgctaccccctgtgcacggcccaacttcaacatcgattgtacatttttaccgaagaaaggcgcttcaatagccagctcatcaggcagataactttcaataatactcaatacccgttcatggatatggcgaagtttcagatagtggttggcaaatttacgcaagtcgataatccccatcgcaatcatttcgggcttggttcctttcactcttagaacaccgtatcccatgattgtcgtaccggggtcaatccccaggattatcttttcttttaccggttgaatcactctatcacctccatcagggtcggaaacccgatcactttatctttaaatatttttgccagttcgtcatttagccgcactccctgttccagatgccagcgatgtagtaatccactgctttccacctcccattgcaaagaatacgcacttccttcttcccgatgacttaatatccggcaaatgcggggtgccttcaacgcaccgtgtttctgtacttcaggaatataactctcttttatccaaatcatgaaattgtcgtgaacgtcatcgtccacttgaaaagttgtattataaatcagcatatcttaatttcatactattatttaccgcaaacatagcaattatttcagaataatgcattatatttgcggcaacaaaaaagattcgtttacaaacgttatcatataagatagaaaaggggcgttagctcatctggctagagcgcgacactggcagtgtcgaggtgatcggttcgagtccgatacgctccactttttaaaagagcaatttccaaaagagttgctcttttttgatagccttcttgaagtaattatattgtacgaatcagaaccaagttatttgataattatggagcgcaaacttatcattcgtaattttggagctatcgcttcagcagatattgcattgaaagacttcaatatcttcataggtgaacaaggagccggaaagagcacagtggccaaactaattactatcttcgagaatagtagggataaagttttgaaggttgattccgactatttaatgactaagttctccgagtacaatattatttcgtattttaatccggacagctatattagttattcttcagaacaaggagatatcacctacgaagatggttccttcaatttcactttttcgtaccattcgacaagccataatttatacattccggcagaacgcttcttcattagtacattctcccgctccatagctactttggtgttgtccaaagcacctataccagtcacattgttggaatttgcctctttctatgaaaaagcaaagaacctattcgtaaattatcaagttcctattttcaatataatattccaagtccgtgaggctagtgagaatctagttttaagcaattatgataaaatcattccattcaaagacgcatcgtcgggtattcaatccgtcgtacccttactcatggttattgattacatcaccaaggagcaatcggacactcacttcgtaatagaagaaccggaacttaatctctttcctgaaactcaaattgctttgctccaacacatagtaaaagaatgtcatcagctgacaataacaactcatagcccatatctactgtcggctttaaacaatatgctagaagccggtaacgtatctaagttacacccggaaaaagaagaagagattgcagcactcatgcctaaaagcagttgggttgactttaataaaattactgcctataagatagaaaaaggacatatcatttctatcttagataaagaatataacatcattgtcgccgaccaaatagactctacttcagatgaacagggaaggattttttcttcattattagatttagaataatatggcaatattcaaacaagcctgcacatgggaagtaacagataagttgctggtagtaaaagaaaataaatgcaaatgcgttttctcaaatcccaatcagcatctactcacaaaaataaaggttgatggttgccaaattactgatggcatcagatgtgactacctgatactcgaccattgtcacaacgaatattttgttgaattaaaggggaaagatctgcctcatgctgttgaacaactggaagccagtatccagcaattatcagcccccaaccatacaattaaaaaaaaggctattattgtatcaagccgtaatccctccaatgacacttcggtacaaagagctaaagctatgttcaagaaaaaatatggagtagagcttatacccaagaatatacaaatagaaattacaatcaaataatatcccgacaaatcagacttccttttttttgcataaatagcaaaaaaaggacctttattcaaggtcctttttaatcacttcgtccatttcttttatacgtttctcacgatctttaatgggaccgtctttcttgtcattcttaaatgcgtcatcggcacggtcggcaacctcgccgctccattcctcaaactggtccttagccggacgaccattcggctcgatattttcctcggctatcgaatcatgcctgttaatcatatcatccataagttttcgttttaaaagtttatggctataagacaatacaaacgaagaaaagttttctattttaatgatttttgaagaaatcagccatgttattatactatcaaagaaacactccagcccaatctgtgtcattcatccagatacctatataaattgcagttgccggcaacgtccagtacattcagctctttcaagcgtttttccactttcttttgtgaaaccagcccgaaattccgtaacatatcacgcaacttcctaaacccatattgagaagtgatttgtagcagttcccgaagtgtttttatatcagcttcagaaatgatccgctgcgaccgaatatcgaatttcaattctgtgataggagtatcgagcaaagcctttaccgcttttatatcttcgggaataaaaatttccggattcttttcttctgcctctctcatgagcatatcattatcaaagccattttggcgagatttcatttcatacgcccgtactgttgctctaaggcggatattttcttccttataagtcctaaggaatcccgcttgagattttatttcctgtacaagtccctcaaatgccttctgcgcttgacgatatttcatgcgtttccgaacactaaaatccttaatatttccttgtaaaacggtataaagaaatagttgccgtctttcatcattccttatcattccggcaagctcctttattattaaccggatcaatggggtcaactctttcagtgattgaagtagaaaaaattcctcttcattttccttcatcttctcatccatccggcgtttgtgttcttcttcggaaagactgaaccggatatttcgttcaagacaatccgtcagactgttttcatcaagcattagataatcgccgacttctgaataaataatctcttgccttttacaccaagtaataatacgtctggtagatacctgatacttggttgccgcttcttcaataccaatccattgttttgttgccataactcgtttgtttttagatgtatacgtcgcaaccggatataaaaaaggtgcgaacgatacatatatttcccaacagcggtactagcaaaaccgacagatgaaaatacagtatgcccgcaccagaacttatatatcgatagggatataagcttggcacggacatttgatttatcatctgtttgaaaattgctagtttcctgttagataaattaaatgtcctataaatacaagtccggctgtcaaaggtccggtccttgattgcaaatatacttcttttttctgaaaagaaagataataaatgacaagctttttagttacaatagaaattttatataagacaaataagtaaacaactacacgggagaatagtttcatcggtgagaaactaaagttccatcagtgtgaaactatagtttcatcagtaagaaactaatagttccaagcaagagaaactaaagtttcaaggcgatgaaactgtagtttcgaaccacaaaaccaatagtttcaaggcttgaaactatcggttacaaggcaggtcccgccccgtaagtacaggggtaataaataaaatagcttatctgcctgtggttaatactattcaggcaatgaaacttcatctgtgatttttacttgatttgggtatgcatctctaccataccgtctttgcagtgcgtttatctcttcttagctttgcagtgacagcattattgccgtcacagtgctgtcaccatactgctgtcacgccattaacttttcataatcaaacagttaagttacaatctgtgacagatgacagcaaatttattttttttatttattggagagagtataagttcaacttataaatgcaatatttcttttttattaatcggactttagatgcaaagttgcttatttattccgatagagttgcggacggaaaggaacataaagagtgtaattactatccgccggctttcctcccaccaatgcaggtgaccatttcggcattcctttgacaatgcggagagcctcctctgcaaattccggatgagtggaacgtagaatatgaggacgaaggataaccccttctttatcaatagtaaactcacataaagcataacccgaaacattcttctccaaaagccctgacggataaaccatttcactggcaatatattcttccggagtcatcgcagagaaatgagcaggttcctccacctgtcttccggaaagtgtctttgaacggggacccaccggataaattccgatatacatcggccgcttataagcatccggctcttccttggtgcgctgttgcaatgcttttaataaagcagcagcctccactgccaacgtctgttcagaaatattttcccctcgggataacatataagccgactgacaaaccaacacgagacgttccatcaacgttcccttttccggcgaccatttacgtcccatctgctctttacctttagcatccgtagaagagaaaaaataaacaattccatccaaaccagccgtagaaccgtccaaatcctgtacctgctctgtcaccaaacgaaagatagcccctaaagactgatatagggaagcactaatgacaaccgatttagtatccaccgtcaccgtccccttctctgcctgccaataagtacgcgataatgtgttcgaaaccagggtataacgtccattcctcttctctaccgacattgcatactccggcgaaaaggaagggatagctgcaaaacgcgcataaggctgtttctggaagcccgtattaagtaaagaaaacacactacgataatattcgcctaactcgcctgtataagtggaaaaaggtttcaccggctccaaatagtcaatctgggccgcaaggcgaaaagaaaaggttaaaagcagaagacagaaaacaatctttttcataagttgccggattttcggtacatatcggcaacaaagatacaaattatttcgatggttcgtgataaaattatatctttgcacggtttttactaagaaactgaataacaatacatcaaaaatatgatagctaagattgaacaacttctgaaagaggtggaagccttacacgcctccaatgccgaagaactcgaagctctccgcatcaaatacctaagtaagaagggagccattaacgacttaatggcagatttccgtaatgtagctgccgaacagaaaaaagaagtcggcatgagactgaatgaactgaaaacaaaagcgcaggacaaaatcaacgcgctgaaagaaatgtttgaaagtcaggacaacgattgtgacggactggatttgacgcgttcggcttatcctgtggaactcggtacacgccacccgctcaccattgtaaagaacgaaatcattgatatctttgcccgtctgggattcagcattgccgaaggtccggaaattgaagatgactggcacgtgttctcggcactgaactttgccgaagaccatccggcacgcgatatgcaggatactttctttatcgaagctcacccggacgtagtattgcgtacacatacttcttctgtacagactcgtgtgatggaaacttcacagcctcctatccgcatcatctgtccgggacgtgtatatcgtaacgaagctatcagctatcgcgcacactgtttcttccatcaggtagaagcgctgtatgtagataaaaacgtatcattcaccgacttgaagcaggtattgctgctcttcgccaaagaaatgttcggtgctgatacaaagatccgtctgcgtccgtcttacttcccgtttaccgaaccaagtgcggaaatggatatcagctgtaatatctgcggcggtaaaggatgtccgttctgtaaacacaccggctgggtagaaatcctcggttgcggtatggtagacccgaacgtacttgaatcaaatggtatagacagcaaaatatacagcggttatgccctcggtatgggtatcgagcgtatcacaaacctgaaatatcaggtgaaagacctccgtatgttctctgaaaacgatacacgcttcctaaaagaattcgaagcggcatattaataatgtgctaaatttaccagtatgccaatgttcccaatgaaaccgtcggacggtgatcgggacattggcatattcatcaacagaccaatcaggccaacggcgttggtttccaatcaacgcgaatcggtcgattgaacgatcattcattatggcaaaggatagactcattactcccagttattgtttcatcttggcagccaacttcctgctatacttcggtttctggttgctgattcctgttttgccgttctatttatccgaattcttccaggctggaaattccactatcggcattgtcctctcctgctacacggtggcagctctctgtatccgtccattttccggttatctgctcgacacgtttgcccgaaaacctctttatctgtttgcttacttcatctttatgatgatgttcggcggatatttaattgccggttcccttaccttatttattatattccgaatcattcatggcgtctctttcggaatggtcacagtaggcggaaacacggtagtaatagacattatgccctcttcccggcgaggggaaggcttaggttattacgggcttaccaacaacacagccatgtccatcggaccgatgttcggactgtttctgcatgatgcgggagtttcttttgctacgatattctgctatgcattcggttcctgtattttaggttttctatgcgcaagtctggttaaaacgccctacaagcctcctgtgaaacgggaaccgatctcgctcgaccgctttatcctgatgaaaggactgcctgccggacttagtctgctgttactttccatcccttacggaatgactaccaactatgtcgccatgtacgcccgccaaataggattgaacacacaaaccggattcttcttcacctttatggcaatcggtatggccatctcgcgtatcttttcaggaaaactggtggatcgcggaaaaataacgcaagtaatagctgccggattatacctggttgttttcagcttcttcctgctttcaacttgtgtatatgtgattcaatggaatgatacagcctgtaccttgctattttttggcatcgcattattaatgggtgtcgggtttggaattatgtttccggcatttaacacgctgtttgtcaacctcgcccccaacagtcagcggggaacagcgacttccacctacctcacttcctgggatgtaggaatcggtatcggtatgctgacgggaggatatatcgcagaaataagtacatttgataaggcctatcttttcggagcctgcctgacggtagtttccgccctctatttcaaactaaaagtgacgcctcattaccataaaaacaagctacgatgagaaagaaagaacgttatgagaaagtaatcgcctggtttcaggacaacatacctgtggccgaaaccgaactgcattacaacaatccgtatgagttgctgatcgctgttattctttctgcacaatgtacggacaaacgggtgaatatcatcactcctcctttgtataaagattttccgactccggaagcattggctgccactacgccggaagtgattttcgaatatatacgaagcgtgtcttatcccaacaacaaagccaaacatctggtcggtatggcaaagatgctggtgaatgacttcaatagcgaggtgccggataatctggaagatctgataaagttgcccggtgtaggaagaaagactgccaatgtgatccagtcggttgtattcaaaaaagcggcaatggcggtagatacacacgtgttccgtgtcagccaccgtatcggactggtgcccgacagttgcaccaccccgttcagcgtggaaaaagaactggtgaagaatattccggaaaagctcataccgattgcccatcactggctcatccttcacggccgttacgtttgtcaggcacgtactcccaaatgtgacacctgtggtttgcaaatgatgtgcaaatatttctgtaacacctataaagttacaaaagaggaaccaaaagccaagaataaataacgatttaatagcaaggaaccgaaataaatagtaactttgcggtcgttctaaaagaagaattttaaaaacacttttaaataaaaatagagtattatgcagacaattgacaaattcaattttgccggtaaaaaggcatttgttcgcgtggacttcaatgtacccctggacgaaaacttcaacattacagatgacactcgtatgcgtgcagctcttcctactttgaagaagattctggcagacgacggaagcatcatcattggctctcacctgggccgtccgaaaggcgttgccgataaattctctttgaaacatatcatcaagcatctgtctgaattgctgggcgttgaggttcagttcgctaacgactgcatgggcgaagaagctgctgtaaaagctgctgctctgcaaccgggagaagtgctgttgctcgaaaaccttcgtttctacgctgaagaagaaggcaaaccaagaggtttggcagaagatgcaactgacgaagaaaaagctgctgctaagaaagcagtaaaagaaagccagaaagaatttaccaagaaattggcttcttacgctgactgctacgtaaacgacgcattcggtactgctcaccgtgcacacgcttctacagcattgatcgctaaatatttcgatgtaaacaacaagatgttcggttacttgatggaaaaagaagtgaaagctgttgataaagtattgaacgatatcaaacgtccgttcactgctatcatgggtggttctaaagtttcttctaaaatcgaaatcatcgaaaacctgttgagcaaggtggacaacctgatcatcgccggtggtatgacttatacatttactaaagcaatgggtggtaaaatcggtatctctatctgtgaggacgacaaacttgacctggctttggatttgatgaaaaaagcaaaagaaaaaggtgtaaacctggtattggctgttgacgctaagattgctgacgcattctctaacgatgcaaatactaaattctgtgctgttgacgaaattcctgacggatgggaaggtcttgatatcggtcctaagactgaagaaatcttcgctaacgttatcaaagaatctaagactattctttggaacggtcctacaggcgtattcgaatttgacaacttcactcacggctcacgtgcagtaggtgaagcaatcgttgaagcaactaagaacggcgcattctcacttgttggtggtggcgactctgtagcttgtgttaacaagtttggtttggctagcggtgtatcttatgtttcaactggtggtggcgcattgctcgaagcaatcgaaggaaaagttcttccgggtatcgctgctattcaagaataagataattgttaaaatcacatagttaattattagaagggcagttctttgtgaaaagagttgcccttatttataaaaacagaattcctcttatttataaaaacgaggtatgaaaagaccgatactattcttttggttcatccttttcttcctttactcttgtcagagtaagaaaggagacagctcttttttacctctaaccgaactgcaaccacttaccctgggcatgatgcctacactggacggacttccttttcatatagccaaaacgcaaggcatttacgactcattaggactggatttgaccattctttcattcaactctgccaacgaccgggacgctgctttccaaacccggaaaatagatggcatgattactgactatcccagtgcggtagcattacaagctattcatcatactgatttaggattcatcctgaagaatgatggttatttctgcttcattgtctccaaagaaagtaacatcaaccaactggaacagctcaaggaaaagaatatcgccgtgtcgcgcaacacagttatcgaatatgccaccgaccagctattaagcaaagccggaatcaagcatgcggaaataaacatgccggaaatcggccagcttcctctccgtctgcaaatgttgcagtacaatcaaattgatgcctctttcctacccgaccctgccgcatccatcgccatgaacagtaaacatcgttcattggtaagtacgcaagagttgggtatcgatttcaccgctaccgctttttcacgaaaagcgctcaacgagaagagagaagaaatcgagctactcatcacaggatataacctgggagtagattacataaaaatgcacccgcagaaagaatgggagcaagtattgatagaaataggtgtgcccgaaaatctgacaggactcgtcgccctccccaattatcaaaaagcaaaacgcccctccgctgaagcgatagacaaggctatacactggttgaaagaaaatcaccgaataccccaaacctactctgaaaagaatctgattgacactacatttattcccacagtatcaaccataatacagtatcaaccataatcaaaatcaaataacaactaactcatgcgaaaaacactactccaactcttaacctttgtattatgcattacaagtatgcaaaatcctctcctggcacaggagcagacaccattaaatcaagttgtcaacacactgaaagaacggattagtctctccggatatgcccaactgggatacacttatgacgatgcagcgaatccggataacacattcgacatcaaacgaatcattttcatggcacacggaaagatcaccaaacggtggacttgtgattttatgtacgacttctacaacgggggcatgttactcgaagtgtataccgattatcagtttctccccggacttacggcacgtatcggtgaattcaaggttccttataccatagaaaacgaattgtctcctactacagtagaacttatcaattgctattcacaatctgtctgctatctggcaggagtaagcggcagcgataaatgttacggaatgacttccggacgggatataggtatgatgcttcacgggaaattatttcgtgacttcctacaatataaagtagctgtaatgaacggacagggactgaacaccaaagacaaaaacagtcaaaaagatgtggtcggtaatctgatggttaatccgctgaaatggttgtccgtaggtggttcgtttatccgcggaacaggacacgccatagctgactctgaatataccggaatcaaagtaggagaaaattacgctaagagacgctggagtgcaggaggggttgtcaccacttccacttttaatctgcgtacggaatatcttgccggaaaagacaggaatgtgaaaagtgaaggtttctatgcaacaggaagcgtgcgttttgcccggaatttcgatttcatcgcttcgttcgattatttcaacccgaacaaagctgcagatttcaaacaaaataactatattgcaggcgtacaatactggttttatcccagatgccggttacaggcacaatacactttttgtaataagaaaggagacggacaaaaagattccaacctgatacaggcacaggtacaagtgaggttttaaattcaaggactaaatttaagtattaggtatcaagtattagagccgaagcatcagggttaagttccaagagtaaagtatcaaggctatagtaagtagtaccttaacaataggattaaagcagtagagttgaagcaagccgaatcaaataattataaaatataaaccttattaataacagaacaaaaatcatggaacacaaaatcgccgaaaccaacgcccgaatagacgtggccgacgtattaagaggattggcagtaatggggatcatcctcttgcacagcatcgaacactttaatttctattctttcccggaagaagtcccttttgaatggatgaaatttaccgatcaggctatctggagaggattattcttcacattcagtaataaagcatacgctgtatttgctttgctcttcggtttcagtttctatattcaggacaataaccaacaacggagagggaaagatttccgcctgcgttttttatggagattattcatcctattcattataggacaattcaatgccgctttctttaccggcgaaatattaaccatgtatgcgattttaggaattatcctgccgatattctgccggatgagtgaccgtacagttgccatctttgctactttattaatccttcaacctatcgactgggcaaaactgatctatgccttgtgcaatcctgactatgtggcaggtaaaagtttggcaggttattatttcagcatcgctttcgacgtacaaaaacatggcaacttccttgaaacagtccgcatgaatatgtgggaaggacaaatggctaacatgacctgggctttggaacatggacgtatcttacaaacaccgggattattcctattcggaatgctggttggccgccgcaaatatttcctgtatagcgaacagaacgaacgcttgtggttaaaagcattagcaatttcgcttctctgcttcttccccatctacggattgaacaatatgttgccggaattcatcgaacggagtgccgtccttgttcctctacagttgatattaagttcattcagcagccttagtttcatggtattactggtgacaggattactgttgactttctaccgtgtgaaagaccgtagtttctttatgcgtttcacatcttatggtaaaatgagtttaacgaactatctcgggcaatccattttcggttctcttttgttctatcattggggattcgaattgggacgatatttaggaatcacctatagcttcctttttggcatcctttttgttctattacaaatggtattctgttcgtggtggctccgacaccataaacatggtccttttgagggtctctggaaacgtttgacctggattggaaaaaataaataattaaataatgatgaacgaaaaaacgattaatgaacaatacgcatatatacgtaccttacttgaagagaaaaggctcaaggaagctctgatgcagttggaatctctgctgtggcagtgtcctgactgggatctacgcactcgcctggaacaattgcagacttcctacaaatatatgctggaatacatgaaacagggagcaaatgaccctgaacgatggaatctgtatcagaaaatggtatcagacacgtggggaattgccgaccaatcacgtttgctcatattggataacgcttcatcaagatactatcatgaagtacgacgtactcccaaatcgccagatttgtcaaactatggtcttaaaactatattacacatactggagtcttttaatgacgacttggcagtcagtggattactgtctgacgaaaagatggatgaagtattaaagcggcatgaggacacgctcaagtttatgtttatcagaacatggacgaacagtgcctggactcccgaagacgaggaagatgcaaaagccatgcttgcctcggaattacttccgggagacgacttatgcttatttgtcagtgccctcacattgagcttgatggaatgtttcgacttacgaaaaataatgtggttgcttgatgcttacgagcatcccaacgtcaacgtcagccaacgggcattggttggtgcgatgattattttccacatttacagaagccgacttactttctatccggaactgataaaaagagtggatctcatggaagaaattccttcattcagagaagatgtcgctcgcatttaccgccaaatgctattatgtcaggaaacggaaaagattgacaaaaagatgagggaggagattattcccgaaatgctgaagaatgtttcctccatgaaaaatatgcggttcggctttgaagaaagcgatgaagagaacaacgacatgaatccggattgggaagatgcattcgagaaatccggactgggggataaattgcgtgaaatgaacgaattgcagttggagggtgcagatgtatatatgagtacttttgcggctttgaaaaactatccgttcttccgcgaggtgcataactggttttatccattcagcaagcaacagtctaatgtgctcaaggcaatgaagcaggcaggaaatcagggaggcagtctactggatttaattcttcaatcgggatttttcagtaacagtgataagtactctctctttttcacgatccatcaattgccacagtcacaacaggatatgatgttgagccaactgaatgaacaacaggttgcagaattggcggagaaatcgaatgttgagacgatgaagaaattcaatgaacgtccgggaacggtcagcaaccagtacctgcacgatttgtatcgtttcttcaaacttagtgtgcgcaagagtgaattcagagatatttttaaagagaagctcgatcttcatcatgtccctgcactcgacaatatattgcactgggaagatgtattattccccattgccgatttctacctgtcaaaggaacgttgggacgaggctattgaaatttatgaagagttggaaacgattggcggattcgaaggagagagtgctgaatattaccagaagtttggctatgcattgcagaaaagaaagaaatatgcagaagctatccaggcttacctgaaagcagacacgttgaaaccggataatatctggaacaatcgccatctggctatttgttatcggttgaacagaaattaccaggtagcaatcacctattataagaaggtagaagaagctgctccggaagataccaatgtgactttccatatcggtagctgtctggccgaattggggcaatatgaagaagcactgaattatttcttcaaactggatttcatcgagaacaactgtattaaggcatggcgtggtatcggatggtgttcatttatcagccagaaacatgaacaggcgatgaagtattatgaaaaaataatagaacaaaagcctctggctattgactatatgaatgcaggacatgttgcctgggtgatgggagatattcagaaagcgtccgttttctatggaaaagccattacggctagtggaaaccgggaacgattcctggaaatgttccataaagatgaagaagctcttctcacacaaggaattcgggaagaagatattcctctgatgttggatttattatagtcttccacatctttcagtttgggatattcagtaaatgttcctgcttaaaaatacagaaaaaggctgcctcattttctattttgaggtagcctttgtgcattattggactaagtatatcttatgtatttcatgtaatcaataagtttattacactgatatattcagatatattcaagatacttactacagctttttcaactctccgtacagtttctgtatgggaagccccataatattatagaaactaccggaaattgatttaaccccgatatacccgatccactcctgaacgccataagctcctgccttatccattggctgataacgatctacgtaatacaggatttcatcttccgacaagacatcaaacagcacttcggaggaagcggtaaagcttttttgccactcagtagtagtcaggcaaacccctgtgaaaacctgatgagattttcccgagagagcgcgaagcatttcaatggctccttccctaccctccggtttcccaagtactttcccatctaaccagactatggtatctgccgtaatcaataattctcccggcttcatcatggtacggtaggcatccgccttttcacgggcaatatattcaggtatttcagcacctaccaatgtatccgggtatgactcgtctacatccggcaatgttctgactacatagtctactcctagtcccgacatcagttctttccgacggggagaattggaagctaatataatctgatatttatttaagttatcaagcatggttttattcgttattaaacaacgattatttatgattaagttaccaaccgaaggcgtcttccaccatccatagaccgtgagctttcagcacctgctccactacatcacgtccgcatccacgaccaccgtctgcataagaaatatactttgcaacggatttcacttccggcacggcatctttcgggcagcatggcagtccgcactcacacatcacttcaatatccggtacgtcatcacccatatatagaatttcatcatcggtcaatccgtacttatcacgaaaagcacgataatcatgtatcttcacagcagaacccatgtataaatccttcactcccagtccctcaaaacggatacgtaccgcttctgtccggccaccggtgatgatagctatgtgaagtccttttttcacagccaactggatggcgtacccatctttgatattcaccgtgcgcatcggttctccggaaggatgcaaaggtacggttgtcgaactcaatactccgtctacatcaaaagctaaagccttgatacgggataaatcataattgatggtgctcatggatacttttgctcattagtttatatatttcctgcaatgccggagaatctaccaacatggcaagatgattactcatcacattctcatcgtaacgaacagcgggtccggtctgtgcatcacgtggcgccaattcgtggactttacgtgctgtttcatctatcagcggaagcatgacatcgaaaggcaagttgtatttttcaagcaaatcagctgctaatgcatacatgtgattggtgaagttacagataaaaacagcagccaaatgaaggctcttacgttgctcggaagaagcctcgtagaccttttccgaaagtgtggcggcaacagccttcaacaattccacgtcttccggccttttcgcttcaacaaagaaaggcacttcctgaaatttaacttcacgttgtttgctgaatgtctgcatcggataaaatactccgtaacgttctgcatgcccttcccaaacgctcatcggaatgcttcctgccgtatgcaccaacaaagacgcttgctttccttctgttatctgcggtaacaaatctactaaagcatcatctttcaacgatacgatatacaattttgcatctttggagactgcctgtaaatctgttgtatattcagcttctactttctcggctaaggtacgggcagattccatagtccggctatatacctgtacaatgcggaaacctttacgataaagagctttcgccagattagtagccaagttacctgcaccgataaacacgatcggtgtatcttctatacttcttttcattattctcttatcgttttgcaaaccagaataaaacgattccgatgatgagcagtgtcaatggcaacagatatccggataacgaacccaataaggacatgaccaaaccgatattcatcactagccaaagcccaagcaacacaaaaccaattgatttatcgcgtttgaaaataaggaaacagatcgaggcgtacaatagcatattgtccttattcatcacccaaggcagtccaatggaagagaaatgaatcagtttatcaatcagataaagtgctccgataacgataaaggtaacagcagtagccagataggtatctttactattattcgctttagcagctcccatacttattttcctccgaacttgttaatatgaattttctcccattgaagatgttcttcattgaaaggtttacgttccatccctttatgtccgatagcaatgacagaaagaatctgaagttgcaagggaatatccaaaattccatggacaaattcatcggaaggcattccggtggcagtgaaacgttcgcgaacctgcacccaacaacttcccaagccaagatcttcagcctgcaactgtatcatgatggaagcaatggaagcgtcttcaatccaaacatcgctggccaacggatcggccattacaacaatcgccaaagctgcatcggcaatgaacgaagaagcctgttccttgcaatgagacaattctttcaatacctctttatcatcaaccactacaaactgccaactattactacgtttggaagaaggggacatcaaagctgctttcatcaacgcaactacctgatcttgtgtcaattcttcatcggtgaacttccgcatactacgacggttctttattaattcactgaaattttccatattatttccggtttcatttgattaatgtatgcaaagataatgcaaaccgagcgtaataggaaataaaagtttatactaaatgaagaatatattgtatctttgcacagagaaataatttcattatgaaaaagcgaattacacaagacgattacattaaagcgaatcgtaaagctagccgtgaggcagaaatagagatgtacgggcaccctatttgtcaccaacgagtgcaccagtcaaagaaagtatataaccgcagaaagataaaggcagccgataaaaagctgccttatttttttgtcatcaagatagcgtcactatatttagaggaattaaaaagatagtttattatacaatccgtgttaattctccagttgtagaatcgataataaatccgtaaactgtcacatctgaaggaatcaaaggatgacgcacgataaaatcgactgttcccctcacggacttttccgtatcttcgaagccattcagccagacatgaaaatcaactccgcagaagcgcatcatgtcaatataatccggatttatcccccgcgccgtcatcttttcaagcatcgtttcactatgcatgtgacaagctccacaatcagaatgagcaatcaccattatctcctccacacccagttcaaagatagctacgagtaaactccggatcacgctaccaaaaggatgggaaataacgccacctgcattctttatcatttttacatcgccattcttaattcctaatgcggctggaagcaaagctgtcagtcgggtgtccatacaggaaagaatagctattttcttatcgggatatttattggtaatatacgattcgtatcccttgttctcaacaaattgcttgttgtaagctaaaatttcttctatcatagttccgcttaaattataaagctctgtttgatgatacaaagatatagaaaaaagggacatatcatcacgacatatcccctctttaatctaaatttaatctgtaagagtactaatacccattgtttccatattcttctgcattatcaatctgactcaagaagttaaaagaaatcggacgcaaataatgcttgttttcatcaaaattttcagctgcacgaggattaccaacagcaagacgttgtttaaaagaatctttgtgacgcttcatcaatacccaacgttgatattctccacataattcacgagcatattcgtccataacatcattctgtgtagcattactcaatttcatagcattgtaagatgcatcattgcgagcggcacgctttttcagtacatttaaatattcagcagcttttccgccatttcctaattgttggttagcttcagctgcaatcagatatacttcagccatacgcataatgaacacatcacctgtcttacgttgcaaattgctactatatgaatcttccgacaaccaattgtatttgttgaaaccagggtacatatttttgtcattagtaacttttatatctgttttacgatattgtccgttatcaaacaaatcatcaatattgattacataatatctacgtttcgctttctccgcatccgaaagtctttcctttgataagtagaaacagattctatcatcatcttcagctacagggtaaggtatcacataggggttcttcacttcctgcaatttggaaggatcaccgctattttcacctttcggccaaaccttggctatcattttgggcgcccaagttccatcataatatgtataattcaaatcaccataaggataaatatactcattatggaattttgcatccaatccataagtatcgattatattttgagtaagaattgtaaatgaactaatattatcatttacgccatgttttgttccaatttttggttttgtaccatcatccaatgtctgcttcttattagtaaataaataactacctcctgactgtacggcagaaaactgtacaaaagccgtagtaaaggttacttcccaccgcttatcataatcagcatcaaaacaatccagcaaatatttggaaggtgccaacgtattattattagtacgtccataccaataattttgattatccggagtaggataaatagtgagagtatttggctttggatacatataagtaaagttgttattacattgtgttccagcattccagttctccaaattcgtagcatccggaccggcagcaataaataaagcttctttattatttcgattatttgccggagcccaaacatcttccacatcatcatacagacagtcaccatacgctaaaatcatgtcctctgccacttctttagcacgttgccaataagatactccctcttctgtcagcccatattcgccaccaccttgagcataaacgcgagccaaaagtcctaacgcggttttcttagtcacacgcgcacgattattatcataaggagtatcttcaagattattggccgcaaatttcaaatcatcaattatctgcgtatatagttcttcaatagagttacgctgcggagtcaaaataggatcttgagacgattcttccaatgttaacgttacatttccatacgtattcaccaatatggaataataaaacgcacgaagacagcgggcttcagccactaacgtcgttatatctttttcattgccatccgttagtaattcagccctgtttactactgcattacaattaccgatcatagaataagcctgaccgaataatttatttgtagcattcgtattcgtagctaaaccatcataataaatcacctgcttggcataatccggattaccggcaggagttatccagcagtccgtaccaccttcagccacagacaagaaatcatagacactgaataactgcccgtaaagtgatgaataacaataagactgtaatcctttaagcccatcgaacgttgcaagaatttcatctcctgttttttggcttggattatactcatcaagcgagcaggcagacattgaagccacagcgaatgtaagcgctgctattttatagattgtacttttcatttcaatactttttttagtgaaaaactagaatgtaacatttacaccaaatacaaattgtttggtcaatgggtacttcagagaaccattcatttcgggatcatagtctttcagcaaatggcttttcgcaaatacaaacggatttgtaatggtagcatagaaacgacacttctctataccggctgattttaagatagatttcggcagactatatcccaatgtaatgttcttaatctttataaacgaaccgtctacatagcgtaatgcgtaatatcccgtatattgttcgagacctttattagcattggcggcaggaaaatcatttgaagggttgttttcagtccaataattaaaataggtcgggaagttacgtatacccttcgggtcataagacgtcaacatatcataagcaaacatctgtccgtaacgtgcataaacaaacacacttaaatcaaaatccttccaggtaaaattattctggaatcctaaagaccaatccggagagttgtgacccagaatttgataatctgcatcacttggagtatatttattatcagaagtgtaataaataacattaccattttcatctacagcagcactacccgtttcttcatctattttatagaatctaccatcagattcttttactaaattaggtatattgattttcaaatcaccaggtgcagcaccaaataccgccgcatcagtttcctcacctttttgccatacaccatccaacttataatgataataagagttaatagcttctcccaatgccaatgcataaccggtgtcaccattattaagcacatctgaatctccaccggacaatttggttattttctctttattatgattgaaagttacacttgaactccaggtaaagttctttgttataatattacgtgtattaagagccaactcaaaacctttattgctagtctcacacatatttaaattagtagtataattcgctttaggtccgccatccggggagaatgctccattaataacaggaagtgccttgttccatataacatcttttgtttttgtattataatattccatactgacatcaatgcgattatttaagaatgcagcgtcaataccaatattcgtgttatacgacttttcccatgtaagcaaatagttcggaatattctgtgagaatttataaatcggcgtcagaacacctcctaatatcatatttacagcagtagcatccaatgatgcagcagacgaatacggatcaatacccgctgtactacccgtaacaccatatccgaagcgaattttcagattactcaaccagttagtcgtactctccataaatttttcatcagagattctccatcccaaagaaaaagccgggaaagtatcccatttattaccttctgccagtctggaagagccgtcatggcggacagatgcagcgaataaatacctacccatatatgaatagtttaaacggccgacatatcccatccccttagacatactataagaagtacttcccgaagttgaggaattaccatcaagaatattatgccataagaatttattatcagaaacacctttttgatacaaagtagtgacatcactacgattgtggttccaagatgtaactgcagtaagagttatatcatgcactttcttaatctggaaattgtaagtaagtatattttcccacttataattatacgaacggttgtccttaacttgcgccttaatgccatctgccgtttgatttgccttataccattgaacagacccctctcctgtgaaagtgttactacgtgaatatcccaaactagcaccagcacgagtaataaaagtcagccctttaagaggagtgatttccaagtaaggattaaaatagaccttaaggttttgagcctgattgcggtacaaacttttatcctcatttaaaagataattatatactgtagatgaaggatcggcaacaggttgcggattgatgcttccatcttcattatacaaggatccaagaggatttgacgccatcaaagtctgtaaatcagaatcagctttattttgatgtacataagacagttgagcatcaatgcccaccttcatccactttttaatcttatgatctacccggattttagatgaataaagtttatagctatcttgtgcaaactgcccatcctcattagagaagttcagagaaaaatatgcctttgtcttttccgttccaccagccacagaaacagaataattctgtgttacactggttttcaacaaagcatccacccaatctatatattggccattttgatgtgcattccattcagcatcagtagtaaacagatttttatcatcagcaaccgagctccaacgtccatcgccagcaccaacagatgcatctctcaaggtttgtatataactttctccactacgcatctccggagtccttgaccagccgtttacacctacgtatgcattaaaattaacaattgctttgccttccttaccacctttagtagtaattaaaataacaccgttcgcaccacttgaaccataaatagctgtcgaagaagcatcttttaaaacttcaatgctttcaatatcattcggattcaatgtagaataatcccccggcataccatcaattataaataaaggatttccggaatccttctggaatgaccggttaccacgcaactgcatctttactcccgaaccggcctgtcccgattcacgcgtaatatccaatcctgccaccttaccttgtaaagcctgcatcggatttgaacttggattcatcactacatcttcactttttacagaagtgatagctcctgtcaaatcgcgttttttcatcgtaccgtaacccacaacaactacttcatccaatgcctgtgtgtccgaaaccattttcacattgaccggtccgttgcccgtcacagtcaccgtttgttctttgtaaccgatataagaaatgaccagttcttttcttcccgccggaagatcgatagagaagttaccgttaaaatcggtaatcgtacctgtacttgttcctttcacaacgatagaaactccaatcagcggctccccgctttcatcgatgatagttcctttcacagttttcgtttgtgtgacaacttgcaccatagtattagaaactccatcttctgcataaacagcgtatgacagaggggcagccaataaagacaaccctaaaatcatggaagcgcgtctatgatgattcttccatgcttcaacaaatgcattacatctcattcgttctaatttaaagttaatattaattctcgttgttttgcaaaaactattcgattataatcttaattaaagacgaatctaattttaatacgtactcacttttcataccatatttcttctataaaatatattttctccattaaatacgcaactatatattatactttacttcaagcagctccaacaaattctttgttttgttgttgaataaagaataaaaagtgtaaatttgtacctagatgccactgaaactaacaacatattatcatgggaaggatattcctgaattgccgggaaaaaataccttccattccaaagagttatttctgatttatgaagcaactcctgggtatactcctttattaatagtggcaacagaagacggcagaccggtggcacgcctgcttgctgccatccgcaaagcaaagaagtggctcccttcttctttagtgaaacattgtgtagtatatagtgaaggcgaatttctggacgagtctctttcgaccaacaaagaaaaggcagaagaagtcttcggcgatatgctcgaacatctcacacaagaagcatcgcgcagctgtgtcctgatcgaattccggaacctgaacaattcgatgttcggttaccgggttttccgtgccaatgattatttccctgtcaactggctgcgggtacgcaattcgctgcacagtatgaaaaagacggaagaccggttcagcccgtcgcgcatccgtcagataaaaaaaggactcaagaatggagccaaagtagaggaggcacataccgtggaagaaatacacgatttctcacggatgctgcacaaggtttattcctcccgcatacgcagatatttccctgccaacgactttttccgccacatgaacaatatgttaatcaaaggacaacaggcaaaaatattcgttgtgaaatacaaagagaaaatcattggcggttctgtctgtatctattcgggagacgacgcatacctttggttttccggaggaatgagaaagacatacgcacttcaatatccgggtgtgctagccgtttggaaagcattggaagacgcacaccaacggggattccgccacatggaatttatggatgtaggacttccgttccgtaaacacggttatcgtgatttcgttcttcgcttcggaggaaaacaaagcagtacccgccgttggttccgcatcaattggagttggctgaacaaactcttagtcaagttttatgtctaaatgtaatctcaagattacaaaacaatgttttatgctcctttcccaccattttttctgtttaataatccaataattaaatgcagaaatatttctttattagataagaaatgtctttctttgtgctgttttatgccttataagcacagatttaaaaccaaataaaaaaagtatagttatgaagatttcacacattgaacatctgggcattgctgtaaaaagcatcgaagaagcccttccttactacgaaaatgtattaggtctgaagtgttacaacattgaaacagtggaagatcagaaagtaagaactgcttttttaaaagtgggcgaaacaaaaattgaactgttggagcctacttgcccggagagtactattgccaaattcattgaaaacaaaggtgcaggcgttcaccacgtcgcatttgctgtagaagatggcgtagccaatgcgctggcagaggcagaaggcaaagaaatccgccttatcgacaaagctccccgcaaaggtgctgaaggtttgaatatcgctttccttcacccgaaatcaactttgggtgtgttaacagaactctgcgaacattaatcataaactctaaaaccaacaagaactcatgagtaatcaacttgaaaaaattaaagagcttattgaacgccgtgccgtagcacgtatcggaggcggtgaaaaagcaattgcgaagcaacacgaaaaagggaaatacacagcacgcgagcgtctggctatgctgcttgacgagggtagcttcgaagaaatggacatgttcgttgagcacagatgcacgaacttcggcatggagaaaaaacattacccgggagacggtgtagtaaccggctgcggtacgatcgaaggacgtctggtatatgtgttcgcacaagacttcactgtttctgccggttcactgtcagaaacgatgtcattgaaaatttgtaaaatcatggatcaagccatgaagatgggcgctccctgtatcggtatcaacgactcgggtggtgcacgtattcaggaaggtatcaacgctttggcaggttatgcagaaatcttccaacgcaatatccttgcttccggtgttatcccacagatttcaggtatcttcggtccttgtgccggcggtgctgtttattctccggctctgaccgacttcacgctaatgatggaaggtacttcttatatgttccttaccggaccaaaagttgtgaagaccgtaacaggtgaagacgttagccaggaaaacctcggtggcgcaagcgttcactccactaaatcaggtgtgactcatttcaccgctaaaacagaagaagaaggtttcgagctgattcgtaaactgttgagttatattcctcaaaacaacctcgaagaagctccttatgtagattgcacagacccaatcgaccgtctggaagattctttgaacgatattatccccgacagccctactaaaccgtatgacatgtacgaagtgatcggcgctattgtggacaacggtgaattccttgaaatccagaaagattatgcaaagaatatcatcatcggtttcgcccgtttcaacggacaatcggtaggtatcgttgctaatcagcctaagtatctggctggtgtgctcgatagcaacgcatctcgtaagggtgcacgtttcgttcgtttctgcgatgcattcaatattcctatcgtatcgttggtagacgtaccgggattccttccgggaacaggtcaggaatacaatggcgttatccttcatggtgctaaactgttgtatgcttacggtgaagctactgtgcctaaggttacgattacattgcgtaaatcctacggtggttctcacatcgtaatgagctgtaagcaacttcgcggtgacatgaactacgcatggccgactgctgaaatcgcagtaatgggtggagcaggagcagtagaagtattgtacgcacgcgaagccaaagatcaggaaaaccctgctcaattccttgcagagaaagaagcagaatacacgaaattgttcgccaatccttacaatgcagctaaatatggctacatcgacgatgtgattgaaccgcgcaacacacgtttccgtgtgatccgtgctttgcagcagttgcagactaagaaattgagcaatccggctaagaagcatggtaatattccgttgtaatcctacttttcacattaaaacaagaacgattatgaacaaaaccaaaatcggaatattcctttctttgctgttgctgattggtctgacttcttgtggagagcaaaagtcgaacaataagctggtgctaaacgaaatcctgatagacaatcagagtaattttcaggacgattacggattgcacagcgcatggattgaaatattcaataaatcattcggtagcgccgacctggcagcttgcttgctgaaagtaagcagccaaccgggcgatacagttacttattttatcccgaaaggtgatatacttaccttagtgaaaccccgccaacatgcactattctgggcagatggcgaacctaaccgtggtactttccataccagcttcaagctgaatccggaaacagctaattgggttggtctgttcgactccggcaagaagttgctcgaccagattgtagtgcccgcaggcactctcggtcccaatcaatcatacgctcgtgtaagcgacggggcagctgaatgggaagtaaaaagtggaagcggtgacaaatacgtgactccgagcaccaacaacaagactcttgacagcaattccaagatggaaaagtttgaagaacacgatgctgatggcgttggaatgtccatttctgccatgagcgtagtattctgcggattgattcttctctttattgctttcaagattgtaggaaaagtagctgttaatttgagcaagcgcaacgctatgaaatctaaaggaattgacaagcatgaagctaaggaactgtcacaggctccgggcgaagtatacgctgctatttctatggcattacacgaaatgcaggatgaggtgcacgacgtagaagaaacggtgctgaccatcacccgcgtaaaacgcagctactcaccatggagttcgaagatttacactttgcgtgaaactcctcccagaaagtaagtcaccttttaaaaagtaaaaacgatgaaagaatataaatataaaatcaacggtaactcatataaagtaaccatcggagatattgaagacaacatcgctcatgtagaagtgaacggtacacactataaagtagaaatggagaaacagccgaagcctgttgcgaaacccgtgacagtacgcccgatgcctaatgctcctgctgctcctactcaagtagtgaaaccgaccgctccatctaccggaaaatcaggagtaaaatctccgctgccgggtgtgatcctcgacatcaaagtgaatgtaggcgatactgtaaagaaaggacagaccattatcatattggaagccatgaagatggaaaacaatatcaatgcggataaggacggtaagattactgccatcaacgtcaacaagggagactctgttcttgaaggtaatgacctcgtaattattgaataatatgggagactttataaactttttaggaaataacctagccgacttctggacatacacaggctttgccaatgctacggtagggcatgtagtcatgattctcgttggcttggtattcatctatttggcaatagccaaagagttcgaaccgatgctgctgattcctatcggtttcggtatattgatcggtaatataccttttaatatggatgccgggctgaaagtcggtatttatgaagaaggttctgtattgaatatattgtatcagggagtgacctccggctggtatccgccactcatctttttgggtatcggtgccatgacggacttctcggcacttatctctaatccaaaattgatgctgatcggtgcagctgcacaattcggtatcttcggtgcttatatgatcgcgctagaaatgggcttcgatccgatgcaagccggtgctatcggtatcattggtggagcagacggcccgacggccatcttcctttcttccaagctagcacctaacctgatgggagccattgcggtgtccgcctactcctatatggcgttggttccggtgatacagccgcctatcatgcgtctgctcaccaccaagaacgaacgtgtcatccgcatgaaaccgccgcgtgccgtttctcacacggagaaagtgattttcccgatcatcggtttgttgctgacttgtttcctggttccttccggtctgcctttgctgggtatgctgttcttcggtaacctgttgaaagaaagtggtgtaacccgccgtttggctaatactgccagtggtccgttgattgatacaatcactatcctgttgggtctgacagtaggtgcttctacacaagcatccgaattcctgacgctcgactctatcaagatctttgccctcggtgcattgtcatttgttattgcaacggcatctggtgtcatcttcgttaagatcttcaatatcttcctgaagaagggtaataagatcaatccgttgatcggtaatgcaggtgtttctgctgttcccgactctgcacgtatctcgcaagtgattggtttggaatatgattcgaccaactatttgctaatgcacgctatgggtccgaacgttgccggagtgatcggttcagctgttgctgccggtatcctgcttggattcttgatgtaagatataaggcaagaggggacgcttgtttgaacagttcttaaaacaaaaaataagattatcctaaaagccttgaatttataaaatcacctttactgtatcattgtagtaaaggtgattttttattgtaagaacttgccacctagaaaatattgcatttgctatggcgtatgcatcgtatcgcgttccgttgtattatcttctcttatcatttcgttaatctatctaaaacaacctacgaacaattcgtaattataatatttttagtaacttgcaacagataagtcaaacaactaaaataaaatattatgaaacggattatcattctattctttctttgctatactattcctttaatagcgcaacatacagaccctattcaagaagccatggcaaattatgactatgagactgccctttccctcattgcccaaaagaaatctatccctcccctgctattgcagaaaggcaaagcattgcgcggactagggctcaccacagaggcacttgccacctatcaggaaattatccgtaatgataccacaaatactcgtgctttcatcgaagcagccgaatgttgccggacattagctaactataatcaagccctgaaatattatgaacatgcactcgatctgaatccggaaaacaaatatgcacgtattcaatatatcagtttgcttctatcccagcagaagtttagggaggcgcttggtgaaagcagcctgatgacggaaaaagatagttccgccattgccctgcatttacaggcacaaagctttgaagggatgggcgaacttcttcccgccgcaggttgctattacaatatccaggctaaatatcccgacgattatctggcagccagcaaactaggcgctctaaatatatccggttcttatttcgacgaagccatcgaagctacagaaaaataccggcaaattgacagtaccaacatttccgtcaaccggcagaacgctttagcgtactgcttgaaacaagactaccccactgccatccggcgttatgaatatcttgtcagtcaaggggacagttcttttcatacttgttattatttaggcattagttactatgcagcagagaagtattatgaggctcatgattttttggaagtcgcccggaaatatgatcccaacaatatcaatctcctttattaccttggccgtgcctgttccaaaacttcctggaaaaaagagggcgtagactatttggaaaaagccattgatctatccattcccaaagacagcagtatgacccggctctatatcgggatgaccgactgttacaagatggcacaaatgtacaaagaacagattgcatccatcaaaaaacgctatcaacagtatgacaaacaaaaccacaaactattgtatgacatggcctatatatacttctatgacttgaaagataagaaaaatgcggaacgctatttggaagcattcctaaaaacacgtcctaaagacactaaagaagaagcggaaatgaacgagagaggcgaacttgttttaggaaaatccaattattataatgccgccgccaactggctgaaagatattcaaagtaaacaaaaaatagaagacttctttcaaaattcctctccacaacttcctctcccaaagaaagataaatagataagaactataaagcaactaaaaggctgctaccggtttatcggtagcagcctttcttttatttatggaataatccggagattattactgtgccaatttgttgtcagaaccgagcacattcagaattttgtgcttgtacagtttttccatattgtcacgagccggaccaagatacttacgtgggtcgaattcagctggtttttcagcgaaagtcttacggatagcagcagtcatagccagacgtgagtcagagtcgatgttgattttgcaaacagcagacttagcagctttacgcaattcttcttccggaatgccgatagcagctttcagtgcaccaccatatttgttgatagtttccacttcttcttccggaactgaagatgatccgtgaagaacgatagggaatcccggaagtttttccattacagcgtccaatacttcgaaagccaatggaggaggaaccatacggccagtcttcgggtcgatgtggcattgttccggagtaaacttgtaagcaccgtgagaagtaccgattgagatagccaaagagtcgcaaccagtgcgagtagcgaagtcgattacttcttcagggtcagtatatgtgtggtggtcagcagaaacttcatcttctacaccagccaatacgccaagttcaccttctacagttacgtcaaactggtgagcgtattcaacaactttcttagtcaatgctacgttttcttcgtaaggaagatgagaaccgtcaatcatcactgaagagaaacctgaatcgatacaagatttgcaagtttcgaatgtatctccgtggtcaagatgaagaacgatttccggatgtgcgcagcctaattctttagcatattctacagcaccctgtgccatgtaacgcaacaaagtagcgttagcatactgacgagcacctttagaaacctgaagaatcacaggagatttagtttcaacagcagccttgatgatagcctgcatttgttccatattgttgaagttgaatgctgggatagcatatccacctttgatagccttagcaaacatttctcttgtgtttaccaatcctaaatctttgtaatttaccattttgtttaaagtttattgttagtgaataaaaattctacgcaaaagtaagcattatccatcgaataacgaacatcggaaagaaaaatatagtagaaaaaggtttaaatcagactgcaaaatttagcaggaatacgagtgtgacattagattgtaatgtccaccttgcaaactttgggatttatgatttctgaattctgattgatgccttcggatttatatctccttatttatacctcatttttcattcatttaatcaccaaaatctgcatagccaatcagaaatcataaattagaaatcagaaattttagaaaacctttttctatttcacagaaaagcattatctttgcgctctgaaaatgaccattacactatttcttaccaaaatagtaacagaatataaattaaaaaaacagatactgaaatgaaaaaaggccttcatccagaatcataccgtccggtagtatttaaagatatgtcaaatggtgacatgtttttgtctagatcaactgtagcaactaaagaaaccatcgaattcgaaggtgaaacttatccgttgctgaagattgaaatctcaaacacttctcacccgttctatacaggtaaatctacattggtagatactgcaggtcgtgttgataagttcatgagccgttacggtgaccgtaagaagaaataattcgatctttcgtgaaagatgaaaaaagaggagattctcgcagagaatttcctctttttcgttttctatattccttaacgtcaagcatcatccaacaagaaatcggctatatgacgatgcctgacaccctccacattatcctgccacaagctgtccatgctaactacatatttaggataatggtcgttaatggcgagcaaaggagcaaactccctctcaacagtggcctgtgaagctaactgatacgttacttgcacataaatcttttcttcccgacggatggctacaaaatccacttctttatcatcctgtttgcctacatacacttcataaccccttcttttcaactccagacagaccagattctccaacatacctgcaatcaaccggtcacgatagcccatcacggaataaatcaaagaaaggtcgcttacaaaatacttttcattcgtctgcagaatttcctttcctttaatatcataccggggaatacgttgaatgataaaagcactttccaatgcattcagataattatagatggtattcatatccaccttccgttgctgacttttgaagtaatcagctatatttttagcgttcagcttattgcctatattatcgaaaacaaacttcactacccgttcgagcaattccacattccggatattgtgacgctgcaccgtgtcacgaagaatgacagaagaatagatgtcgtagacaattttatagatagcctcatatccataatcggcagtatgtatggccggaaatcctcccatacggagatatttctgaaattcctccttccggttgagcgtcggatcattggcctgcaagtcatggaaagtcagatattctctaaaagacaaggtcatgacatggaaagcgacataccgtcccgttaaataagttgccagttcggacgataacatacgtgagttggagccggtcacataaatatccgtatccaaatctaccagaagtgagttgaccactttttcccaaccgtccacttcctgaatttcatccaagagaatataatatttacccgcatctcccgcctgtccccgaatataagcatacaaagccttcgcctctttcagatctatccactgaaaactttcaaaattcagatagatgatacgttcttcacgaactcctctcctcaacagttcgtcacgaatcagacgcagcactaccgactttccactgcgacgaatacccgttatcacttttacaaacggcttatctataaaaggaacaatttgttccatatactgttcacgattaatcatattcaaaagtttttagggttataagcacaaagatatactattttcggaaagtttttagggttataaccctaaataaatccataaattcagattcttttagggttataagccgaaaaataaataaaagaaatatgactaaatccgatttattaccaaataaagaaagtacctttacccgactaattaataaaaaatggaaataaccgatttaaaacaaatgacaaaggaagaagttttcaatttcatcagacaacgcctttctttcagtaaagaactgcaagaacaattcaggcatgtgaataaagacgatctcgcaaaagaacatcgcagattcgaaatgtccggaaatgaatcaaagacaggccaatgcacgattttcaacacagcgattctgaacgagtttgccgatcttggcatctatgattatacttcttacctttttctcgacttccacaatggcactccaaccgtttatctcaaatacttctccgaaaatgaaaatttagaatattcatttaccggatataccacaacggaaatcatctttgcaattcttgaactgactatcttctccggaaagcccaaaagaaatcgcagctaaaaaaagaattgcacggaaagacaatacgaggtcaaaagacttttatggctttcatttaggcacggattacacgggtttcacggttccattagactaaaaccgcgaaatccgtgtaatccgtacctaaataatatcaatctaatagatggttttacttttggctccctcctttttatcatcacattatatttgccacccgtatagcatatttaccatctttataccatactctctattctcataccatatttcctgcatttatttcctcttttccatcctattccgaaaaaaacatatatctttgtcacacgctttctgcccatcagcgtgatgaaacaggcaaaagcgtttttttattccttaatggagtaaataacgtattgtctctcaaacttaaaaattagcagttttttcacaccgagagatgatacaacagatactccacgtagatagtcgtatatcaacatatcgattagagatttgttatatataaacgtttggcgtgggtgtctgttgtttatcattatctggtgaagggtgttgctaagccttaagtttagataatggtacaacagcactcacgcttttattgtatccggtcggtttcaacaatccttataccccaaccaattccccagccgaccgaaatcataaaaatcgtgggtgttcgttgcacctctccggacaatacgttatttactccttttttataacacattaaaacaaaagcgatatgccaaaatggattagtgtagaaaaagcagtgattaagtatcacatcgaaaaagaagcgatcctgctttgggtggaaatgggacaattccctatgttatacatagacaatgttccgaatgttgacgaagaatgtattctggaactctttcgccgaagtaaagccggcattacagcagaatatattgatacgctggaacaactgtgcatagataaaacaatggtctgcgagaaatacgcccacattattcaattgaaagaaaaggaaattcagctgcagaaggaaataaatacgttgataaacgaaatacaggcagcaatgaagagacaaaatgaacggatccgggatttgaaaaaagcgattggagagaataacaacgttatacgtagtgacagttggataaaaaggctgcgcaaaaggtttcaatggtgaataattatcagtgtaccaattaccatgtgggacattattgcacggttttcaccacagaggataaggagcgccgtcctttgccctttgcagcctattcccattccctccacagctttctttaaactcctccataagctctttaaagcctatattcagacaatgaaaaatgcaaaatattttattacatttatttaactaatcatcctttatataagcaatcttatcctttgtaaagtcaagtaaattcactacatttacatcactaacaagaactgaaatgtgagcatttcagcacaaagaaatctgtatgaaaaaaacgatgaagaatgacagttgcctgacggtttcccgtcgggcagctattatccgccaagatgcggaagagaattacggcacactgttgacactgggagaatctatgcgccgtgcataccaagtagaagaactgatagaccggatgagatgggacaacgccgatttctgcctgcaacgaacagacggaacctgcctttccattacagggacactgacagaatatgaacactatttcggccgcccctactacgaaaacccctccaacaggtttctcccatactatgacgtgcattgtagaaaatggcttacgtgtcgagtggcagggattgtattcggctcttctgtgaaaaaaaattaattttatggattaaataaggaaagttgtaggacatatacgaaataaagtagttactttgcaaccgcaagtaagagaaaaaatcatgtcaatgctgcttccttgttttttgacagaagcagttatctgtttttccagcattgctttttcagaacttcggaattaaatctcccctgctccgaaaattccctatattacagattacatacacgaagagaatactccgaatccatcatgaagaatgagtacgatatttgctgctttccaaagaagtggccggattcttcgtatctgtattttcagaaaaatagaatttaaaacagaaactaatatattttattatgacaacatctaattcagcaaataccaaacaatcgaacaacgcatcacaaaagagaaaaccgattcataacggttacttcaatcatcccacttcttcttccagcaatatacccatgagtattttgatacgggaacaaggactggaaatatacggactatactgggtgatgctcgaagaagctcatgcacagcttaaatgctgcgtcaatatccagacaatggaaatcatcgccaatatattccatgcccaacccgaacatcttgagctcctctaccaccattatttccggcgtcccggcaaaggatacaactcgcatatactctatgccgacttttgcgaagaatctgccatcagaagttatttcccgcaccccctactggcatacaccgacaacgaactgctgcggatgattatgcaagacggactgaaagcctacggactatattggcttgtgatggaaaagctctatcaacagccacaacattttctggcaccgcaaactgcttccttcatccagaacctttatgatgtgagcgacgaactgatggaaagcgtattatacaattacggactcttttatctggatgagaaaatgaacctccattctaaagcaatagacgactatagggaagcacttgacaacatggaagatgaaaaaaagcgcaacacgaaaccgcacgtcaataactctctgaaagccaacggaaatgaagaggattttaacactcgggaaataaaaaaaacgtcaaatatacagaaaaatccatcccccattataaataaagaaataaacaaaaaaaattcttcttctgaagaaaacggaaaagaaaaagaagaagaaaaaggtttgaaggtgacggacttgaacgctgtgacacccgatatgcgccccaacgcatgggaagaaaatctacaggaggcaatgaacgacacgtcctggtatgaagtcgtagccattcagtcgggcatcccccggctgatgatggaagaaaaagaatggttcttcaactatttacgggagcaaatcatcttacggggaaatgaaagctcgatgaacagcctgcacgaagtaaaaaactatttcgccaatctcacccggcagggaagccatgtgtcatccacaacgcaggtggcactgaagaagtttctcaaaaaccggcaagagcaacaacaatgttcgccctacgaaaccatcaccaacggaatacgtacctacgacgggcatcccatccccgcttatgccaagccgcgaccttcggcagcacatatctggaatccggtgacgaacgaatggacacgatagcatattatctctcaatcatttactaaatatggatagattcaaagaactgggtattgatacccacggtcgcacaagcggcaaaatgaaaacaaaatgtccctggtgtcatgcccaacggacggataagcgtgataaatcactaagtgtcaacctcgataccaaactgtatttgtgccactactgcggcgcacacggttcggcagccatatatgccggaaaaggcagaaagttgggtgatccgttggtcaaatttccaacggcaacaggtagcaactccagttatccgcccactgaaaagccgcacggcgacccagagcaaggggcactcacacagaagcaaattgaatggtgtcgtgacgtccgccacattccgccggaagtattggtggaagctggcgtggctttcgcctccatctcgatgcctatatccggaaaggagaaaggttgggaaaagagggactgtctctgcttcaacttttttgaaaacggggaattggtgaacacgaagttccgcgactcacaaaagcacttcaaattgctgcaaggagcgcgcaccatcccttacaacatcgacgccatccgcgacacgccggagtgcatcctcgtggaaggggaatttgatgctctctcctacatggctgtcggccggacggatgtcatttccgtgccgaacggtgccaacagtcaactggactggctggacgaattgtcggaatctcatttcgagcagaaacaagtgatttatctgtcggtggacaccgaccgcaagggacgggaactgtgccgggaactctcccgacggctgggggtagaccgctgccgtatcgtcacctacggcgaagcatacaaggacgccaacgaactgctcgtggcggaaggcccggacgcactactgaaggcactggaggacgcgcccatcccccgcctggaaggtacgtttacggcagaagacttacgggagggattgcaccaactgtttgaagagggatatacctcgggcgtggaattgggaataccgaatctggacgaaatcatgaggctggaaacggggcgggtgctcaccgtcaccggtattcccggacatggcaaatcggactttgtggatgagatagtgctccggctctgcacccgccaagattggcgagcgggatatttcagtccggagaacacgccaatcgagtatcatcatgccaaactggcggagaaactgctgggacaccgtttccgcaaagatttctctacggaggaggaattcgcccgcgtagtggattatctttcgcaacgcgtctggcacattcttccggacggggatttcacactgggcaacgtcttgtcaaaggcacgcgaactggtgcaccgtcacggcatccgtgtgtttgtcatcgacccgtacaattacatcaaccatcagatcccggcaggcatgacggagacggggtatatcggttcattcatgaatagtctggcacgttttgcccggctcaactcctgcctcgtcattctggtggcgcatccgagaaagatgaacaagcaatacggcacgcagaaaacggaagttcccaccatgtatgacatcaacggctcggccaactttttcaacatgacggactacggaattgtggtagaccgtcaggatgaaatggggatcgtgtatatacacgtcgagaaaacccgtttccgtaatttcggaacaaagggaaacgcagcgttctgctacgatgtgaccaacggaagatattccccttgtacgccgccacccgaaccgggcatgcaggtgcaaccgtggaagggagccaaagacttattctcgtcagagggatggatttagggattaaggctctcccaaatacttctcaatcagctccacctgcaacggtgtgagccaatgtatccaaaacgcccagccggtagcttcgagagcctccagcagctcccggtttcggcggatgcatttatttaaatgtcttcttgccacatcggcacttgcatacggcatatagagtaatgccaattccgttttcttcatagattttcttcttttaatttattatttacgtcatgtaaagatactgttttttgcgtagaaatgcaatcaaatacacagatattcaatcgtttgccttcacttaccggcagataccgtttcatgtttcctcccctgccggttggggtatctttgctactgtaaaagagacagaaaacgttcgtttactgactcaataaaatcttatttattcacttaaaaaggaggaaatcagtatgttgatttacaaagcggttcagtccaatatcgcatcgaaggacaaaaagaagaaatggcatccctgcctgattaaaatgggaaacgtagtggatacgcaaatgattggcgaaacgattgccgaacggtcatcactgacggccggtgacgtgcacaacgtgatccgaaacctgatggcagtgatgcgcgagcagttgctcaacagcaggacagtgaagctcgaaggattgggcacatttaccatggtgtgccagtcacgctgcaagggggtggatgcggaagccgatgttagtccggcacaaatcacgggattgcgttgccagtttacgccggaatatacacgggatgccggtggaaatatcacccgtgcgctgattcagggagcgtcatatatccacgtcaaccagttgacgaaagcactgggagcgggaggcagtggcaacaccggaggttcgggtgatgacaaaccgggtggcggtggtcaggaagcgcccgatccggcagcgtaatagaataggtgatagaggatagtgtggtatggaaaggaggtgttgaattatgaagaaatccatttggaatacgattttaaaagtcgtcattgcggttgctactgctattgcaggcgtcattggaggtcagaacctgatgatgtaaaatgacacaaaagagttggacgggaattttaccttagaaacggtaaagttcccgtttttttgtgttccatataaaggttaagaggcaggatatgaaaagacaggaatattgaacataaataaacaggagttgttttagtatattattcgctatttatcaacgcaaaacctctaaacatcaacgtggtatatgaaaaagaaatttggattcgtcctggcggctgcaatcttgctggctggctgcggacagaaaaaagaaacgacaacgacaactgcacgtcccgtaaagactacgattgtcgagtcaagatcgattatcagaaaagatttctcgggaatcgtggaagcggtggaatatgtgaagctggctttccgggtcaacggacaaatcatccagcttcctgtcatcgaaggacagaaagtgaaaaaaggacaactcatcgcagctatcgaccccagagacattgcgttgcaatatgccgctacgaaatcggcatacgaaacggcttcggcacaagtggaacgtaacaaacggctcctctcccggcaagcgatctccgtacaggaatatgaaatcagcctcgccaacctccagaaggcgaagtctgaatacgaactgtctgccaacaatatgcgcgacaccaagctgacagctcctttcgacggttctatcgaaaaacgactggtggaaaactatcagcgtgtcaactccggtgagggtatcgtgcagcttgtcaatacacacaatctgcgtatcaaattcaccattccggatgcgtatctttatttgttgcgcgccaaagacccgcgtttccttgtagagttcgacacatttaaaggacacgtgtttcaagcgaaactggaagaatatcttgatatttctacggatggcacaggaattccggtcagcatcacgattgacgatccgtcattcgaccgcgatctgtatgctgtgaaacccggtttcacgtgcagcatccgtttcacggcagatgtaggtccgttggtgcaggatagctggacgatcgtaccgcttagtgccgtattcggcgaaagcgaagggaataaaatgtatgtctgggtggtagaagacaacaaagtccacaaacgggaagtgaccgtcaacgccccgaccggagaagcacaggcgctcatctcggaaggtttgaaactcggcgaaaaaatcgtcatagcaggcgtataccaactagtagaaggagaatctatcacaactgttgacaggtgatagttggtaaatgattatgtaatcatttatccgctgtcattcatcaattatcaacgatcatttattatgagtttagccaaatattcattagataatacgaaaatcatctatttctttcttgctgtattgctgattgggggaatcacttccttcggcaagctgggtaagaaagaggatgctcctttcgtcataaagtcggcggttattatgacccgctatccgggtgccgaaccggcagaagtggagcggttgattaccgagcctatctctcgtgaaattcaaagtatgagcggtgtgtacaagataaaatcagaatcgatgtacgggctctcaaaaatcacattcgagttgcaaccttccttgtcggcaagctccattccgcagaagtgggatgagttgcgacggaaggtgctaaatatacagccacaattgccgagcggtgcttccgcaccgacggtttccgatgatttcggcgacgtgttcggtatctattacggtctgacggcggacgacggttacacatacgaagagatgcgcaactgggcggaacggatcaagacgcaggtagtgacggcagacggggtgatgaaagtcgccctgttcgggacgcagacggaggtggtcaatatttttatttccaccaataagctcgtaggtatgggcatcgacccgaaacagcttgccagtctgttgcaatcgcagaaccagattatcaataccggagaaatccgtgccggcgagcaacagctccgggtgactgccaacggtatgtataccaccgtagacgatatccgcaaccaggtgattaccaccaaagccggacaagtgaaactgggcgatatcgccgtcatcgaaaaagggtacatggaccctccatccaatatcatgcacgtgaacggcaaacgtgccatcggcatcggcgtctccaccgacccgcaacgggacgtggtgcagacgggcaagaacgtgaaagccaaactggacgaattgttgccactgatgcctgtgggactggaactgcaaagcctgtatctggagaacgaaattgccaacgaagccaacaacggatttatcatcaatctgatcgaatcgattctgattgtaattgtgattatcatgttggtgatgggtttgcgcgcaggtgtgctgatcggctcgtcactgattttctctattggcggcacattgcttatcatgtctttcttcggtgtcggactgaaccgtacttcattggcgggatttatcatcgccatggggatgctggtggataacgccatcgtggtaacggacaacgcacagattgccattgctcgtggagtagaccggcggaaagcgctgatagacggcgcaaccggtccgcaatggggattgcttggggctacgttcatcgctatctgttcgttcctcccgctctaccttgctccttctgccgtggcggaaatcgtgaaaccgctttttgtggtgcttgccatctcgctgggattgagctgggtgctcgcgctgacgcagaccaccgttttcggtaatttcatcctgaaagcgaaagcaaaggacggcacgaaagacccgtatgacaaaccgttctatcacaaattcgcctctatcctccgcacgctgattcgcaggaaaacattgacactgggttcgatggtagtgctctttgttgcttcgctggttatcatgggaatgatgccgcaaaacttcttcccttctctcgataagccttatttccgagcggacgtgttctatcccgacgggtatagcatcaatgacgtagtgaaagagatgaaatccgtggaagagcatctggcaaagcagccggaagtgaagaaagtatcgatcaccttcggcagcacgccgttaaggtattatctggcttctacttcggtgggcccgaaaccgaattttgccaatgtattggttgaattgacggacagtaaatatacgaaagagtatgaagaagatttcgatgcgtacatgaaggcgaattatccgaatgcgattacccgtaccagtctgttcaaactgtcgcctgcggtggatgccgctatcgaaatcgggtttatcggtccgaatgtggacacgcttgtggcgctcaccaaccaggctttagagattatgcaccggaatccggatttaatcaatgtgcgcaattcgtggggaaataaagttcctgtatggaagcctgtatatagtcccgaacgggcgcaaccgttaggggtatcgcgtcagggaatggcacaaagtatccagatcggaaccacaggcatgacgcttggagagtatcggcagggcgatcaggtgcttcctatcttattgaaggataacacggtggattcgttccgcatcaacgacctgcgcacgttgcccgtgttcggcacaggcaatgaaacgaccagtctggaacaggtggtatcggaatttgatttccaatatcgtttctcgaatgtgaaggattacaaccggcaaatggtgatgatggcgcaatgcgatccgcgtcgcggagtgaatgcgattgctgctttcaatgaggtttggccgctggtgcagaaagagattaaagtaccggaggggtatacgatgaagtatttcggggaacaggaaagtcaggtggagtctaacgaggcgttggccaagaatttaccgttgacattcttcctgatgttcgtcacgctgttgttcctgttcaggacgtatcgtaagccgacagtgatcttgttgatgttaccgcttatttttatcggtatcgttttgggattggtgttgctaggcaagtcgttcgacttcttctccatccttggtttgctcggattgattgggatgaatatcaaaaatgcgattgtactggtggaacagattgatctggaagcaaagacgggcaaaaagccgttggatgctgttgtcagtgctacaacgagtcgtattgtccccgtagcaatggcgtccggcactaccattctgggtatgttgccattgttgttcgacgcgatgttcggcggtatggcggctacgattatgggaggtttgttggtggcttcggcactgacattgtttgttcttccggtagcctattgtgccattcaaagaatcaaaggctgattgccttctcttatatgaaacttgaatttattgtttagattgaataaaatgaaaactcaacttataactctgtctctgctgctcctcggcttcacagccggagcacagcagccctatcttagccgggaagcttaccgggataaagtggaagcttacagtcaaattctgaagcaacagaaactaaagacaatggcaagtacggaagcacggaagattgctcacacgggattcttgcccaaaattgatatcaatgcggacgggaccctcaacatgagcgaccttaatgcctggaacgaaccggtaggcgaataccgcaaccacacctatcaaggtgtatttatcgtctcgcaaccgttgtacacgggcggggcactcaacgcccagcacaagattgcccaagcggatgaaaggctgaatcaactaaatgaggagctcaccatcgaccagattcattatcagagcgatgcagtttattggaatgcttccgcttcacaggctatgttgcaggcggcggacaagtatcaaagtattgtgaagcaacagtatgacatcattcaggatcgttttaacgacggtatgattagtcgcacggacttattaatgatttccacccggctgaaagaagcggaattgcaatatatcaaggcgcgtcagaactataccctggcgctgcaaaagctgaatatcttgatgggagaagagccgaacaatcccgtagacagtctgtacacgattgacacggcttccgctccggtgcagatcctttctctggagaatgtactgcaacgtcgcgcggattacgaaagtacggaggtgaatatcatgaaaagtcaggcgcaacgcaaagcggctcttagccagttcaacccgcaattgaatatgtatttcagcggtggatgggctacagctacacctaacctcggttatgatgtttctttcaatcccatcgtcggcattaacctgaatataccgatcttccgttggggagcccggttcaaaacaaaccgtcagcagaaagcgtatatcagcatacagaaactgcaacaaagttatgtgacggataatatcaacgaggaactttctgccgccctaaccaaactgacggaaacggaatatcaagtgaaaaccgccaaagagactatgaatctggctaatgaaaatcttgatttggtttctttctcgtataatgaaggaaaggcaaacatggtggatgtgctctccgcgcaattgtcatggacgcaggcgcacaccaatctgattaatgcgtatctgtcggaaaagatggcggtagcggaatacagaaaggttatcagtgaataaatttagaaacaaaagaaacttgttcacaaagtcttagtcttataaaagaaaatcgtcctgccatcacgcaaccgtgaaacaggacgatttctttttatatcataaggactacaaaataccgttttgcttcaggatatcttctatttccttatctgtgatatttgcacgttctgacttatcataaatagtgagcaattttatctctgtatctatttctgtccagattatcgtataggttatcacccgtgcacctccacttttacctttatttttcgaagttatcgctatacgtattttacgaagattattgcccaaactgactccttgttcaggatttaataacaaatcatttccaaaattcctaagatcttctttcaacgatttataccgttttgacaaatgcttcatttcccttaaaaattcgagggtaacgcttattctatatttcattaagggcatcatctaatgacttaaactccaacttaccctccagattcagtttcagttccttacacgcctgatctaagcttgccagaatctccgcctttgtctggtagggagctgcttcctctgcgacaacattcgtttgctcttcttcacaactcaacatcgatttcactctccgcagaatagcgacatcatccacatccagaatccgccgaatcagttcgttcttttcggcttccaatgacattgcactcatacgcttgctatttttactgttatacattcacacaaagataacgctatcaaacgaatcttccaagtgtgaatgtataaaaagtctttttcaggcaggaattaccttacgcaaggaaggagatcaacacacccgcagctacggcagaaccgattactccggagatgttgcttgccatgcaatactgcaatacgtgattcttcggatcgtatttcaaagcaatctcattggctacacggctcgccatcggaacggcactcaaaccagtggcgccgataagcggattgattttcttcttcgagaagagatttaccagtttcacaaagaaaataccaccggttatagaaagtgcaaatgcaaggaatccaccgatcacaataccgattgttgtccagttgaggaatgcttcggctgtcatcgttgctcctacggacagtccgaggaagatggtggcagcattcatgatgctattggaagcggcatcgaacaagcggaatgtgttggttccgatttctttcaccaggttaccaaacatcaacatacccaccaaaggcactgcacttggcacgaagagggcaacaatagtagttaccacgatcgggaagataatcttcaatacacgcaggttcttgatttcagtcttcgaagggtacttcttttcctgttctttcatgttgatgctcaactctttcttagaacaaagcagcttcaccaccagcggaataatcaccggaacgagcgccatgtacgaataagcggcaatggcaatcggacccagcaaatgcggcgccagtttgatggtagtaaagatggctgtcggaccatccgcgccaccgataatgcccagagaagcggcttcctgtggagtgaatcccatcaggatggctaccagcaacacggtaaagatacccaactgtgcagctgcaccgaatatagaaagatgcaggttacgcaacatcggcccgaagtccgtcagcgcaccgacacccataaagatgatcggaggcaggaaacctgttttaatcaacatatagtagatgaagttcatgattcccagttcgtgggcaatgtcatgcaaaggcatttcccagatgttcttcaacactccgtttaccatcaccataccattttcgtcggcctgaatcacgcccatatctcctccggggaagttggctagcaacacaccgaaagcgatggggacaagcagcaacggctcgtactgtttcttaatacccaaatagagcagaacgaacgcgatggcatacattatcaggaactgcggttcggcaatgatattgctgaacgcagtcatgtcatataagttctcaaatatttcgttcattatcctatcttcattaatacgtcatcttctgaaacagcatctcccgggttgacacagatagcagtcactgtaccgccaaactctgcacggatggcattgtaggtcttcatcgcttctacatagcagattacatcaccttctttcacagtgtcacctacttgcaaaggagtttcctgcgcacctttcactaagaagaacttgccttccaacggagaaagtacttctttaccctctcctgccggagcagcggcagcacccgcaggagcagcaggtagttcggtatcaccgtatgctaccgtcacacgataggcctgtccgtccacttgtacggtcagcgtcttcggtttggcatcttcttccggagatttatctttttcggcacgacgtttggctacgtcttccaggaagtcttcttttgctttgccactcttgtaagcctcatattgagccggatgcatagcatattcgaagagttcttcgtcgtcctgtcccacttcccatttgttctctttcatcagtttgcgatatttgtcgagagcatcaggatagttattctgtggatcaccttcaaagaacttacggccttcacgctctgccttttcaatgatttcgggagcaagtttgcccggcagacgtccggctttacccagaatcatatcccagatatcatcggcaatcattccccaacgttcttttcctttttccatagccatcacattcatcatggcgaggttcttcacgtattggctgaacggagtcaccaatggaggataaccgacacgaggccatacgtatgccacttcatcaaacagcttgataagaagctggtcttgcgtcataaacggcagattgtgttttgccttatatttattgattgattccagattggattcgagatcggccatcaaactacccatcataccgccgggaagtccgggagcaatcagcaaagagttcatcagacggtttttcgggctgatatacaagccgaggaagtcgtccataaattcctgaatcatgccgcgcactttcatgtaggcttccatattgatttcgggcacttgatatccggcgtctttcagcatcgcctgcacactaagcaagtcagcatggcctgttccccatgatagtggttccatgcctacgtcgatgtagtcgcaaccggcttcgcatacttcgaggatgcttgccatattgaatccgggacctgcatgactgtgatactgaacggggatttcgggatgtgctgccttgatatttgctacgatcttacctaacgatacagggcggccgattcctgccatgtctttgatacagatttcgtctgctcccagtttgatgagttccagcgccatattggtgtagtactctacggtatggataggcgaatgagtgatgcaaagcgagcattgcgaaatcatgcctgcttcctttgcgtatgtgatggaaggagcaatgttacgcacgtcgttcaatccgcagaacgtacgggtaatgtctgttccttgtgctttctttactttgtagaataatttgcggacgtctgccggaacggggctcatacggagtccgttcagtgcgcggtcgagcatgtgggtttgaataccggcttcgtggaacggttttgtccattcgcgtaccgctttattcgggttttcaccaaacaataaatttacctgttcaaaacctccgccgtttgtttctacgcgggcaaaacagcccatttcaatgatggcaggagctacctttacgagttggtctacacgaggtacgtattttccggcagattgccacatatctcggaaaaccaaactaaactttacttctcttttcatgtctttcagtgatattctttatagatttataatttttctactttagtgatttttcctttaccttgtgtcaccacatttacagcagctgtaatggcggctaagatgtttcccggaacaggggcaggaccttgcgatgcttcccgcttcacaggaaccacttcttcaggagcatacttgttgactaatgtaatcaacaacttacctaaataaatcacaatcagcagaataacaaatacggtagccattccgaccaccatcagcaggatcgctgtttcgatattttccatataataaactattagtattttaagttgttcgtctaaaaagcgtccgaaaataccaaatttttattataaaataaattaagaaaggaatataatgtataaaaacgtcatttctctgattggaaaactggggaagtttaatgatttatgatttatgatttatgatttagcgtgccatccacatctaaactaaattcccatttatcttatttactatctgcttctattgcataacccaaatagtaaatggtaaatagtccaatagtaaatcgtcctatctattgttcctacaaaaaatgtgagagaaagcccctcaactttctctcacactctgataaaacaattattaaataaaaatactcaatgatagaccggttcagcccttttctggtttcataccctcttaacctactattaaactaccagataaaaaaccggtcttgttaaacctctcatgggccatcacggctttcattcttttaattagcgtagcagtctagttgaaaaacccttttttaagccaactaagtctgtttaatcggaaaaaacaagcctctaaagctcatatcacgtccgatgagggaatctttccggcttacgtttgtggcaggaataattcatctgccgctgtctattgtttgctttgagccctagtttgcatttctaaaacattgtttgttttgggttaaatttaaattttataaaaagcatctattgtttgttttgagtttagcttgtaattctctataaaacatctattgtttgttctgaatcctggccttatttctgccggataatttctaatttcttctacaacatttaatcttctaatcaattctaccgttttcttcaaatatcattaaatagctcatctattagaaagagaagcatccgttgtttttttaccaagaaaaaatgaagaaaatttgaagaaaaacaaaaaagcctcttctggatagtcagaagaggtttttttttattttaaaataatttctttccctcgaatttgataactgattccacacgatccaaagactttttccagtgtggcgttcaggtctttcgttaagaccgtcccgttgtaggtcagcccctcgcatttctcatgtccgacgactgttacttcaaatatatgctcaatatctgccactacatttattagcggatcgtcttcataccccaacacctcggggaactccgattcttctgcctttttctctaccggcacaatcttgttctcatcgcaatgaacgctttccccggcaagcaatgtacgcttacctacagcagtctcgacttgcacacttccttcctcacagttgacggtcatcttctttccttgctgatcgatgaggaatttcgttcccagtacggttacgtcgccggcttctgtacggaccgtgaatgtcttgcctttggttacgttaaaagaggctttacccaatagttgcaatttgcgctcccaaagccatgtgatatgattataagtcaggcgggaattttccatcacctgcacagtactgccatccggcaattcatagttcatagcagtgttatcagtcaccaccttttcttctgccaggaagtaaccgcctatccccaaaagaaggacaactgccgctgccactccccatgagaaagagaaacttctccccgcaccttgctttcttctccggcttaaggcgatcttatggctctcctcacgttgcaacttcagcttatcacctatttcttttttacgagaaaagatttcgccaaccagaggaagttttccttcttctaagtatttatctaaagattctgtccacttttccatatctcacacctcaattaaaaatccacaaattagctgctaccaacaacaagaaagatttgctcatacgctcccgcaaactggagatagccatatgagtagtattgtaaaccgtacgtgaagtgagtcccatcacctgggctatttcttccggactcatcttcttataatacttaagatacaatacctcccgctgttgctttgtcaaattgttcagctctttctgcaaaacttctagctgttctttttctaactctgaacggataatagcagtttcaatatcaatctccagatcaaactgatattcatttgtgcctacttcatccagtgattttaatgagccactattctcctttttcagttcgttcactatcatgtgtctcaacgaaacacataagtaagcgggtatggattgaggagccgtgcaagtttctcttttctcaaagatgtaaacaaacaacgactgtatcgcctcggttaccagagtctcatcaccggctatcttcatgccatatccatacagtaaatctgcatattgctcataaagctgccggaatgcctcttcatccccttgctgaattttatcccaggatagtgtcttcatttctattcactcatttatatgagatatgtttttcctttttttacctgattttttagttaaaatcaacggaatatgttttaaaactcacttgtaaagtggaatttgatgtgtttaaagtccatctgcgccatctgaagtacataaccggagtctgccaggaacacatcgcgcccttctctatcctttgccatatactggtatttacgtttcttgaaggcttccagttctgcgggatcatcgctttctacccaacaggctttataaagacttaccggttcccagcgacaggacgcattgtattcattcaacaaacggtactgaatgacctcaaactgcaactgtcccaccgtaccgataatcttacggccattgaactgattgacaaacaactgtgccacaccttcatccatcaactgatcgatacctttcgccaactgtttctgcttcatcggatcggcattttcaatatacttgaacatctccggcgagaagctcggcaatccgcggaaatgaagcatttcaccttctgtcagcgtatcgccaatcttaaaggtaccattatccggcagaccgataatatctcctgcataggcttcgtcaatcgttgttttacgctgtgccataaattgagtgggcgatgaaaaacgcatggtctttccatgacgaacgtgcacatagggagcattgcggacaaacttgccggagcaaatcttacagaatgccacacaagaacggtgattgggatcaatattggctgtgatcttaaagatgaatccggtgaatttcggttcgtcgggattcacttcacgctcttctgcctgtacgggacgaggactgggagctatctccacgaaacagttcagcagctcttgcacaccgaagttgttcaacgctgatccgaagaatacaggtgcacagtctcctgcgagataggattccgaatcaaattcgggataaacaccttcgatcagttccagatcaccacgcagcttgtctgccaatggcttgccaatctgctgatccagttcttccgtatgaatatcgactgccactttttccgttaccatctgtttggatggctggtacaagtccagtttctgttcgtagatgttgtatactcctttgaaacgtgctccctgctctatcggccaggacaagggacgaacctgaatcatcagttcttcttcgagttcatcgagcaagtcgaacggatcttttccttcacggtccattttgttgacgaagattattaccggagtctttctcatgcggcatacctccatcagtttacgcgtctgcgtttccacccccttcgcaccgtctacaacgatgataacactgtctacagcagtcagtgtgcggtatgtatcttcagcaaagtcctggtgacccggagtatcgagaatgttgattttataatcccgatagtcgaactccatcacggaagtcgttaccgaaataccacgttgtttctcgatttccatccagtcggacgtagccgtcttttttatcttattactctttacagcacctgctacctgtatctgacctccgaaaagcaataacttttccgtcaaagatgtcttaccagcatccggatgtgcaataatggcgaacgtccgccgtctcaaaatttctgtattatctgccatagttattaaattgagaattgaaaattggaaattaaaaaatgatactcaaagtggtttcttttttatttctcaactctcaatttttaatttccaatttctccaggcatcgttggagactttcctcccaatgggggatttcgatgccaaatgttgtttttatttttgttttatcaagtacagagtatgccggacggttggcctttgcaggatattcggctgtatgcagaggtttcactttgcaggaggttattcctgccaagcgatgaatagccactgtgaaatcataccaggaacaaacgccttcattgctgaaatggtagatgccgcggactatacctttatttataatggtatagatggcacgtgccaggtcattagcataagtcggggttccgatctggtcgaaaacaactcccagactgtcacgctcttttccaagacggatcattgtcttcacaaaattattgccgaaagtggaataaagccatgcagtacggattacgactgctttctcgcaataattcatcacgtcatattctccttccagtttggtggtgccgtatacggagtccggacaagggtcgcaatcctccgtatacggagtgtgtgcagtaccgtcaaagacataatcggtagatacctgtatcatggcggctccgttgaattgtgccgcacttgccaattgtttcggtgcttcgcaattcaattgataggctagttccgaattatcttccgctttatctacggccgtatatgcggcacagttcacgacaagctcaatccgcttctctgcgatataagcccaaacggcttgcttgtcacagatgttaagctcctctacatccgtgaaataatacgtatgttgcgggttctcttttgcaagcacctgcatctcattgccaagctgaccgttggcacccgttaccaaaattctcatttattcatccagttttaattcacctttacggtctttatcataatagtttgccaacatagaaaggaaactagtgatagcttccactgccttagcagtaccttcactgataggctttttttgaagacgaagcaggagcactccatacaacgcctcaaaacaggtctccaattcgggctcgtctttcttgccgtttttattccgtaattctactataaacggcaatgccttgaaataggcggcactgtaaaaaggaaatttaggagaagaagccaatgcgttatgcaattctgtcagattgataatcacattcttattaatctgcaaatgacctttttcccgtactccttcctcactcatcatcgtaatcaggttggtataccattctctcatggcaggctgctgatctgccggataacgggcaattatatttacctccatctcttccggttcacaatgattggcgcggatcaagtcttcctcttgccacatatatataaggtactcggcaatattcttctctttcagttgttgtgctatctgattcataagttatctcttaataaagtgattctcccaacaaagtaaaaatcagtccggcaagggataccagcattacgatacttcctacaacacgattcagtatccagataccacgtaaattgaatttagtgcgcaccttattcacaaaataagtgatacccaaccaccaggtcaatgctcctatagcaattgcaagatatcccgtgatctcttcaaagaccagcacccccggctgcacaaaggcaaaacgggcgaaaagtccgataaacagaaagattatcaagggattggagagagtgacgaaaaatgcggtaataaagttatggaaataagaacctttgctggaggaagccggacgaatggactgcaccgggttgctacgaaaggtatatataccaaaaaggagtagcatgatgctccccaataattgcagatagaaaatattcttattaatataatcgaacacaaagctcatcccgtagccggtgagcaaagcgtatgctatatcgctcaaagaggctcccagacctgttacaaatccataccaacgccccttattcaaagtcctctggatgcataatacgcccaccggaccgaggggtgcggacacaacaacgccaataataaagcctttcactaatatatcgaatattgtctctatctgaatcatgtcgcaaatatcgcacttttttgtgatatggggatagtatattaacgttttttccacacaagaatcactatatatagcgataataagtaaaacgtacatcgaaaataaacatattaaataaggtataggaatttattctctatttttttcctaccaccaacgaaattgattatctttgcgccacagaaaaagagaagagtttctcctgcaggaacttcaatcgtaaaatcgtaaatcgtaaaatcgtaaatatacaacatgattctttttttcagaaccccttccaagagcgtgattgccgtagagagcaaccatcagctcacccctgacgaaagtaataaactctgctggctttttggcgaagccgtgatggaaagtgaagaaaacctgaaaggctgtttcgttggcccacgccgcgaaatgatcactccctggagtacaaacgcagtagaaatcacccaaaacatggggctcgaaggcataagccgcatcgaggagtacttccctgttaaggacgaaaatgccgattacgacccgatgctccaacgcatgtacaaaggactcgaccaaaacgtattcacgacaaaccgtcagccggaaccaatcatctacattgaagatctcgaagtgtacaacgaaaaagaaggtttggctctttccaaagaagaaatggactacctgaagaaagtagaaaaggacctcggacggaagctgaccgactctgaagtattcggtttcgcacaaatcaactccgaacactgccgccacaaaattttcggcggaacgtttatcatcgacggcgtaaagcaggaatcttccctgttccagatgattaaaaagactacacaggaaaatccgaataaaataatctctgcttataaagataacgtagccttcgctgaaggtccggttgtggaacaatttgctccggcagatcattcaaaacctgatttcttccaagtaaaggacatcaagagtgttatctcactgaaagcggaaactcataacttccctactactgttgagccattcaatggtgcttctaccggtaccggcggtgaaatccgcgaccgtatgggtggtggtaaaggttcatggccgattgcaggtactgcagtctacatgacttcttatccacgcacagaagaaggacgcgaatgggaagagattcttccggtacgcaaatggctataccagactccggaacagattctaatcaaagcatccaatggtgcttccgacttcggtaacaagttcggccaaccgctgatctgcggttcggtactgactttcgaacatacagaaaacaaagaagtttatggttacgacaaagtaatcatgcttgccggtggtgttggttacggtacacaacgcgactgcctgaaaggcacaccggaagctggaaacaaagtagtggttatcggtggtgacaactaccgtatcggactgggtggcggttccgtatcttctgttgataccggtcgttacagcagtggcatcgagttgaatgccgtgcaacgtgccaacgcagaaatgcaaaaacgtgccaataacgtagtacgcgctctttgtgaagaagaggtgaatccggtggtttctatccatgaccacggatctgccggacacgtaaactgtctgtccgaactcgtggaagaatgtggtggtttgatcgatatgagcaagttgcctatcggtgacaagactttgtctgccaaagaaatcatcgctaacgaaagtcaggaacgtatgggtctgctgattaaagaagaggctattgaacatgtacgtaagattgccgaacgcgaacgcgctccaatgtacgtagtcggtgaaacaaccggtgatcatcgtttcgctttccaacaggctgacggtgtacgtccgttcgaccttgccgtagaacagatgttcggttcttctcccaaaacctatatggtagacaagaccgtagaacgtcattatgaaatgccgaaatacgaattgtctaaactacatgaatatctgacgaatgtattgcagcttgaagctgtagcctgcaaagactggttgacaaacaaggtagaccgttcggtaacaggcaaagtggctcgtcagcaatgtcagggtgaacttcagttgccgttgagcgactgcggtgccgtagcactcgactaccgtggcgagaaaggtatcgctacctctatcggacatgctccgcaagcagcattggctgatccggctgccggctctattctttctgtatccgaagcgctgaccaatcttgtttgggctccaatggcggaaggtatggatagcatttcactgtctgccaactggatgtggccttgccgctctcaagaaggtgaagatgcccgtctttacacagctgtaaaagctttaagcgatttctgttgcgcgctgcagatcaatgttcctaccggaaaagactctctatctatgacacagaagtatccgaacggcgagaaagtgatttctccgggaactgtgattgtttctgccggtggtgaagtttccgacgtgaagaaagtggtatctccggtattggttaacaatgaaaagactacgctttatcatattgacttcagcttcgatgaactgaaactgggtggttcggcttttgcacaatctctgggtaaagttggtgacgaagtaccttgcgtacaagatgccgaatatttccgtgatgctttccttgccgtacaggaacttgtcaacaaaggattgattcttgcaggacacgatatctctgccggtggtttgatcactacattgctcgaaatgtgcttctctaatgtagaaggcggtatggaaatcagcctcgacaagatgaaagaacaggatatcgttaagattctgtttgctgaaaatccgggtatcgttatccagatcagcgacaagcataaggatgaagtgaagaagattctggaagatgcaggcgtaggctatataaagctgggtaaaccgactgacgaacgccacattttggtatctaaagacggtgctacttaccagtttggtatcgattatatgcgtgacgtatggtattcttcttcttacctgctcgaccgcaaacaatctatgaacggttgcgcaaaagcacgttttgaaaactataagatgcaacctgttgaattcgctttcatgccggaattcaaaggtaagctttctcaatacggtatcactccggatcgtcgtaccccaagcggtatccgtgcggctatcatccgtgagaagggtacaaacggtgagcgcgaaatggcttactcactctatttggcaggtttcgacgtaaaagacgttacaatgaccgacctcatcagcggacgcgaaacactggaagacgtaaacatgatcgtttactgcggtggtttctctaactccgatgtactgggttctgctaaaggatgggcaggcgcattcctgttcaacccgaaagctaaagaagcattggataaattttatgcacgcgaagatacattgtcattgggtgtctgcaacggttgccagctgatgatggaactcaatcttatcaacccggaactgaagaagaaaggaaaaatgctacataacaattcacacaaattcgaatcacgcttccttggtcttactatcccgactaaccgcagtgtgatgttcggctctttaagtggaagcaaactgggtatctgggtagctcacggagaaggaaaattctctttgccatatgacgaagataaatataatgtagtagcgaagtatagctatgatgaatatccgggcaatccgaacggttccgattattctatcgcagcactggccagcgcagacggacgccacttggctatcatgcctcacttggaacgttccatcttcccatggcagaacggttgctatccggccgaccgcaagaacagcgatcaggttactccatggatagaagcgtttgtcaatgcccgcaagtgggtggaagcgaaaatgaaataaatcatttccatattttacagaggctggtactttaaatagtgccagcctcttattttacggaactttccattctaccggaagacttctgatagataccaaaataccgaaaacaaacagtatatacaaatagttataaaatagtctattttcttcatttttggagcgctgttatctttcatcaaaattttgtaatatcaaaaaatcttcttaattttgtcaaactttccccctcataaaagattcaataacccttaaaagtcctatttgtatgaaaaaatggctttttctaatcttattgtttcctctaatttgtgtcgcgcagacgtatcgatatctcggagtggaggatgggttaagtaaccggcgggtttactgcattcaaaaagataaaaccggatacatgtggttcctcacgcacgaaggtattgatcgatacaatggaaaagagtttaaacgatataagttaatggatggtgacgcagaagtgaactctctgttaaatctaaactggctttatattgatcaggaaggagtcttatgggaaatcgggaaaaaaggaaaagtattccggtatgaccagattcacgactgcttcagtcttgtatataaattaccgatggaaagtttcagcgaacagccggacccggtcacttatgcctggctcgaccagaataaacacatctggctatgcaataaagatactatctttctctataatacggacaccaaacaagtcacccatataaagaatgatataagtgaagaaatcactgatattgaacaaatagacgaatcgcatttcttcatcggtacggaaatggggattcattatgcccaattagaaaacaacgcattgaaacttatcaattgcgataagttggagagcgtgaaagcccaagtaagcgatttacacttcgacaaaaagattcggaaactattcatcggcactttcttgcggggaattatggtttatgatatgaataccaaatccgtcatacgaccggattataacctgaaagatatcagtatcacacggttcaagccgctaaatgacaaagagttattaatagctaccgatggcggaggagtacacaaaataaatatggatacttatcaaatagtacccgaaattgtggctgattataacagtaattgtggcatgaacggtaacagtatcaatgacatttttgtggatgatgaagaacggatatggctggctaattatcccatcggaatcacgatacaaaacaaccgttatacgagctacaaatggattaagcactccatcggcaacaaacagtctttaatcaacgatcaagtaaatgccattattgaagacagagagggagatttatggtttgcaacgaacaatggcatcagtttttttaattcaaagaccggacaatggcgatcggtgcttagtgcttttgaagagtcgcaaggtaataaaagccatatctttcttactatatgcgaagtggctcccggaattatctgggcaggcgggtactcttccggtgcttaccagatagataagaaaacgttcagtgtcagctatttcatgccgcctttgtacactcatacaaacaagcgaccggataaatatatacgtgatattcgtacagatatgcagggttatatctggtcgggaggattctacaacctcaagcgtattaatctgaagacgcaggaagtacggttttatgatggattaaattccattaccgccatcgttgagaaagatgaaaaaagtatgtggatcggtagtgccaccggcctatgtcttttagataaagaatccggaaaattcgagcgcataaaacttccggtagagtcgaactatatctattccctgtaccaagcaaaaaacggttcattgtatataggtaccagcgggtcgggactattgatttacgatattaataaaaaactgttcactcattaccacacggaaaactgtgctttgatatccaataatatctataccatattatcggatgcggacaaagatataatcatgagtacagaaagcggattgacaagtttttatcccaatgagaaaaaattctataactggaccaaagatatgggattgatgaccacccatttcaatgcgctatcaggtacgttacggaaaaacaataaattcattttaggcagttctgacggagcagtggaatttgacaaggatatgaaattgcccagaagttattcttctaaaatgattttcagcgatttcaagcttttttatcaaacaatctatccgggtgatgaggattctccgttgaaagcaagcatcaatgatacaaaggtactaaagttaaaatacaatcaaaacagattctctttgcaggtttcttccatcaactatgactatccttccaatattctttactcttggaggctagaaggtttctatgataaatggagcaaacccggaacagagaacacgattcgttacaccaatcttgccccgggcaaatatacgctaagggtacgtgccatctccaatgaagacaaacgcatcatgcttgaagaaagaagtatggatattatcatagcccaacctttctggctgacattctgggccatgctggtttatacagctatcctttgtctcattgccatcgtcctattgcgtatactgattttgaggaagcaacgcaaagtctccgatgagaaaatacacttctttatcaatacggcacatgatatccgtaccccattgacgcttatcaaagcacctttggaagaactacgcgagaaagaggagttgagtaaagaaggtatttcgaacatgaatacggcattacgaaacgtaaatgccctattacgtcttaccaccaatcttatcaactttgaaagagcggacgtatattcttccgaattatatatttcagagcatgagctaaacacgtttatgaatgaaatattcaacgcgttccagcagtacgccaacatcaaacatatcaacttcacttatgaaagtaatttcaggtatatgaacgtatggtttgataaagaaaagatggaatctatctttaagaacatcatttcgaacgcactgaaatatactccggaaaatggaaatgtacaggttttcgtttcagaaacatctgactcatggagcgtggaagtcagagacacaggaatcggcatcccggccaatgaacaaaagaaattgttcaaacttcatttccgtggcagcaatgctattaattccaaagtaacaggaagtggtatcggactgatgcttgtatggaagctagtccgcctgcataaaggaaagattaatctgtcaagcatcgaaaaccagggatcggttatcaaaataacattccctaaagacagcaagcgcttccggaaagcacatctggcaactccgagcaaacagcgtatagaaaatacgattgataacgttccgcctccatcacctgaaatttacgaaaatgcacaaaagaaagagaacattaatcatcgtcgcatcttgattgtggaagataatgatgagttgcgcaactatctgtcgcaaacgttatccgaggagtatttcgtacaggtttgctccaatggaaaagaagcattgacgattattcccgagtacaaaccagagctggttatttcagacattatgatgcctgaaatgcggggggatgaattatgccaagctatcaagaataatatcgaaacctcccacattcctgttatcctgctgactgctttgaataatgagaaagatattctctcgggacttcagattggtgcggatgaatacgttgtgaagccattcaatattggtatattgaaagctaatgttgccaatctgctggctaaccgtgcactattgcgcagcaaattcgcaaatttagatctgaatgatgaggaaaatgatgaagactgcatcaactgttcgcaagacattgactggaaattcatagcaaacgtcaaaaagaacgtggaagataacattgacaatcctgctctcacggtagatgtattatgcagcctgatgggaatgagtcgcacaagtttttacaataaattaagggcattaaccgatcaggcaccgggagattatatccggctgattcgtctgaaacgtgccgtacaattactaaaagaagacacacatagcataacagaaattgcagaaatgacgggattcagtgacgccaagtacttccgcgaagtatttaagaagcattataatgtaagtcccagtcaatatggcaaagagaaaaaagcagttagtaaggaaggaggagaaaagaaagaatgaacatttatctcgaagcatttggaatcttttttaaaataggcgcctttactattggaggaggatatgcaatggtgccactgattgaaaatgaaattgtcaccaaacggaaatggattgcgcaggaagattttatcgatctgctggctatctcccaatccgcaccgggaattttggcagtcaatatttctatctttataggatataagctgcgtggaatccggggaagtattatcacagcattgggaacaattttgccgtctttcattattatattggctatcgccctgttctttcatagtttcaaagacaatccgatagtggaacgtatttttaaaggaattcgcccggcagtggtggcactcatcgcggcgccgacctttaccatgggacgatccgcaaaaatcaaccgctacaatctgtggattcctgttgtctcggcaatattaatctggctgttgggcttctcccctatctggattattattgcggccggtgtaggaggtttcctgtgggggaaatttagaaaagttgagagttgagaatggagagttgagaaggcgcggattaacgctgttgttttacagattcataattctaaaagccgggaaatccgtgtaatccatgcctaaaattattatataataaattattaatcacatgatttacctacagttattctatacatttttcaagatcgggctctttggcttcggtggcggttatgccatgctttccatgattcaaggcgaagtggtaacccgctatggatgggtgagttcgcaggagttcacggatattgtcgcaatcagccaaatgactccaggacctattggtatcaacgcagctacttatgtagggtttacttctacgggtagcgtatggggttccatcattgctacctttgccgtagtccttccctctttcatcttgatgttgaccatcagtaaattcttcctaaaataccagaaacatccgatagtagaatctatttttaatggattacgcccggcagtagtcggattactcgcctccgccgcgttggtattaatgaacgcagaaaacttcggttcgcctacggaagatacttattcattcgttatcagtatcattatctttctgattgcattcatcggaacaagaaaatataaagccaatccgatattaatgattatcgcctgtggtattgcaggtttgctgctctattaataacgagcggctgaacagtaaacaaaaaaacagtaaacaaaaaaacggtgaataaactgcgttatcattcagcagagtgttcaccgttttatcgttgtttattctatacctttacagttttaacttcttacttacggatttcgattcattatgtaaacgatctaaagctgtcactacataacggcattttgtttttcctgtttcataaggaagtctatagaatggattgcgcgtgatagctacaatatgagaaggatcgtccaaattcaccttttctttactgtcaaaacgatagactacatattgaactgccttatccatctctgtatcagctttcggagctgtccaaaaaaggatatagccatcttccgtccatacctttttcattttacgtaccttgcccggagctttatcatccataaaatcaaagactggaatcaaagcaggatatttatgatattcactgattaaagcatcgcgatatctaccctggttctcaacaacagctgctgcataccattgacagctacctccgattgtttggtaagcacgttgcaaagccatcttgcggggaagctgattgatagaagaattctgcggatcggcaaactgaactgtctttggcaccgactgaccaatgaacaacggccggttttccgaatgagtagcccaccatttcaccagtgtctcatagtcggcagctttgtggccaatctcccagtaaatttgcggaatattataatcaatccatccttcacgtgcccaaaggagtacatcggcataaagatcatcatagttctgcaaaccattggtgttgcttcccaatggatcgctcttctgattacgataaataccgaacggactgataccaaacttcacccaaggcttgatgccacgaatcgtttcgtgaagcttctttatcaacacattcacattactacgacgccaatctgccttattggtgaaacctccaccataacgggcgaaacttgcatcatccggaaaatccaatccattaaccggataaggatagaaataatcatccatgtgaatagcatctacatcataacgagacacaatatcggtcacaattttacagatatgctcccggctttcgggaagtgccggatcgaaatatagctgatcgccataagtaacaaaccattccggatgctggtgataaatatgctccggcgccaacttattttttaatgaggtcttcacacggtaaggattgatccaggcatgaaactccatattccgtttctgacattcttcaatcataaactgcatcggatcccacataggagaaggcatctgaccttgcgttcctgtcagaaaacgactccacggttcatgctgggaagcatataatgcatccgcttcagggcgtacctgaaagatgattgcgttaataccagcttcctgaagagagttcaactgactaatcaatatttgtttcagcctctctgtgggaatgccacgaaactgaccgtttacagcttgtatccacgctccacggaattcacgtttaggatatttattgcctgatggcacctgtgccctcactcctaccaccagaagaagagctaaaagtaaaagatagtttttcagcttcataatattcttaaatcgtaataatgtgacgcaaagataatacaaactcccgataaattcgctaactttgccgactaccataaaaaaggagtattttatgtcagaaaacaactatatttcgatcaaaggcgcacgcgtcaacaacctaaaaaacatcgatgtagatattccccgcaacaagcttgttgtcatcaccggattatcgggttcgggaaaatcatctcttgcttttgatacgctctacgcagaaggacaacgccgctacgtggaaagtttaagcagctatgcgcgccagttcctggggcgaatgagcaaaccggaatgtgactttatcaaagggattcctcccgccattgctatcgaacaaaaagtgaacagccgcaatccccgttctactgtgggcacctcgactgaaatttacgaatatctacgcctgttatattcacgggtagggaaaacgtatagccccatcagcggacaagaagtaaagaagcactctacagaagacattgtcaactgcatgctctcatacccggaaggtacaagatatacggtactgacacccatccgcctgcgtgaagaccgcaccttgcaacagcaactggagatagacctgaaacaagggttcaaccgtatcgaagtgaacggtgagatgaagcgtattgatgaatatacgcctgtggcaggtgatgaagtatatctactggtggaccgtatggctgttgccaacagcaaagacgccatcagccggctgactgattctgccgaaacagccatgtatgaaggcgacggaacctgtatgctgcgtttttttctatcggatggaactacgaaacttcatactttcagcactaaattcgaagcggacggcatcatctttgaagaaccgaacgaccagatgttttcattcaactcgcctatcggcgcttgtccggcgtgcgaaggattcggcaaagtaatcggcatcgacgagcacttagtcgttccggatcgttcattatcggtgcatgaaggagctatcgtatgctggcgtggcgaaaagatgggtgaatggaaagaagaattaattcataatgcggagaaattcgacttccccattttcactccttattatgagttgacagacgcgcaacgcaggttactttgggagggcaaccaatatttccacggcatcaatgattttttcaagatgctggaagagaatcaatataagatacaataccgggtgatgctggcgcgttaccggggaaagacgctttgcccgaaatgccacggcacccgcctgaaaccggaagccggatatgtacgagtgggtggaaaaaacatttccgaactggtagatttgcctatcacagagctgaaggaattcttcgatcatttggaactggacgaacacgacaacaacatatcccgacgtatcctggttgaaataaatagccggattcgttttctaattgatgtaggtttgggctatctgactttgaaccggcttagtaattccttatcgggtggagagagccagcgtatcaatctggcaacctcgctgggaagtagccttgtaggtagtctttatattctcgatgaaccaagtatcggactgcatagccgtgacacagaccgtctgctccatgtgttgcgtcaactgcaacaattaggaaatacggtagtggtggtagagcacgatgaagaaattatccgtgcagccgattacattatcgacataggtcccaatgccggacgcctaggtggagaagttgtctaccagggagatatgaaggatttaaagaagggaagcaacagttatacggtacgttatcttttaggagaagatgaaatacccgttccgaagcatcgccggccatggaataactatatagaattgaaaggcgcacgtgagaataatctgaaaggagtaaacgtacgtatccctctcaatgtaatgacagttgttacgggtgtttccggttccgggaagagtacattggtaagagatattttcttccgggcattgaaacgtgaattagacgaatgtagtgaccgaccgggagaattcacttcaatcggaggaagtttgcgtgacctgcggaatgtagaatttgtagaccagaacccgattggcaaatcatcgcgctcaaatccggtgacttacatcaaggcttacgacgaaatccgcaaactatggtccgaacagcctttggcgaaacaaatgggatatacccccggattcttcagtttcaatagcgaaggcggacgttgcgaagagtgtaaaggagaaggaaccattactgtagaaatgcaatttatggcagacttggtgttggagtgtgaatcttgtcacggaaaacgtttcaaatccgacacgctggaagtgaaattcaacgataaaagcatctacgatgtattggagatgaccgtcaaccaagcgattgagttcttcaacgaacatggacagaagaaaattgtgaagaagttacttcctttgcaggacgtaggactgggatatatcaaattaggacaggcttcttctaccctttccggtggtgaaaaccaacgtgtcaaactcgcattttatttaagtcaggagaaagctgacccaacgatgtttatctttgacgaaccgactacaggattacactttcatgatatccgcaaactgctggatgctttcgacgcattgattcgccggggacacagcatcgttatcatcgagcataacatggacgtcatcaaatgtgccgattatgtaatcgatctcggaccggaaggtggagataagggtggaaatatcgtagcagtgggtaccccggaagaagttgctgcctgcggagcaagctatacagggcagtttctgaaagaaaaactaggataagcaatcgtcaaaactataataatacatctatgtaattaagcccttgcagaagttctatatctgcagggcttaatatatgaaaaaaatcaatctctcttacaagtagaaaccgaatccaatcttcacaccgaaacgcgacatatctccatcattgaaacgccatttataataaacggcaggttcaatggtcaccgtacgcgaaaggaagtaagcgtatccggcttcgatgcccagtccccagtctgtctgatgttttccaccactccaacggaagcggttccagtcgagtccgccacccagatagataccagttttattgaagtagaaacgtactcctgtacccagtgtatactcatctactggtttcgaccagtcggctccagcatttaccatcaaggcaataccctcggcaaaaaatgtaccgacctgtgcaccaactccaaactttgctttatcgtttttactatacgaaaagtccaaccccgacaatgaaggattgataatcgtagttcctttctcaaattgcgcttgtgcagtaaaagagactgccaataagcaaagagccaaagctaatttcttcataaacttacttttttaagtgaatatattgttcgtcttttttgcggcgttcacgcatttgttcctttttccgaagcaccagccaaagaaggaggacgatgacataagaaactgccaccgtaattattttctctgtcaggctgacttccgtattacgaggcaacaaataagccgctgttacagatacataaataaggaatgcaagcgccactcctgttgattttcttattttcttcattctgataattttcttgttttttgcttatttatccagatatagaaccaaacagtcgcaaccattacacacgctataccaacgccataggagactgtatgcgagagtcctaatccttcaggagcaatacatatataagtagaacatacacatgtcataaacagtgccggtaccaaagtaatgatataaggtttcttggataccgccagaaaaactgttatagcccacaaggtaaacacagccaatgtctgatttgcccaggcaaaataacgccatatcatattaaatccgtttgcatcacgcaaactatacaaaagcaaaccaatagctagtacaaacatcggaatacaaatgtacaaacgacgacgcatacttttttgttccatccccaggaagtctgccacaatcagacgtgccgaacggaaagccgtatcacccgaagttatcggagcggcaatcacccccaaaatagcgagtactccgccgattgcccctaaccattcttttgtgatggcatcaacgataacagaagcattgctttcttccattccgttttcatggaaaaaataagtagcggcagcagcccaaataagagcaacaatgccctcggtaatcattgcaccgtaaaataccggacgtccatgccgttccgaagtcatacaacgggccatcaatgggctttgcgtagcatggaaacctgaaatggcaccacaagcaatactcacaaacataatcgggaagataggaagttcgctcgcttccgggttcgtattttgcaatccgtcccataactccggcaaagccggatggttaacatagagcatcaccaaaatgcctactgccataaacaacaaggcaaccgcaaacaatgggtagattttacctattattttatcaacaggcagcaaagtagccagaatataatatgcaaatacaacgataatccaaaacgtagcatccaaactttccggagtgagttttgccaacaatccggcaggacctgcaacgaaaactgaccccaccagaatcattaaaatgacagtaaatcctctcatcacctgcttggtagtcagtcccaaataacgacctataatttccggcaggctttcacctccattacgcaaagaaagcattccggcaaaataatcatgcactgcccccgcaaaaatacttcccagcacaatccacaagtatgaagagctaccaaatttcgctcccatgattgctccgaaaataggacctaatccggcaatattgagaaattgaatcatgaaaatcttccaggtgggcaatggaatatagtccactccatccgccttggtaagagccggtgttttacggtcgtcaggaccaaagacgcgttccatcaggcgtccatacgtaaaatagcctactatcaacgccagcaggcatagagtaaatgtaatcatagcgtgtcgtttttttaacttggcaaatgtaacataatctcacgaaacagcccaacaataccgacacttttactaactttgcagggatttaaaacaaaaaataaagaatatgcactatactattttcattctttcacttttgtatcctttcctctcaattgttgcgcaacccaagcacgaagttcgtgccgcatgggtgacagcggtgtacggactggattggcctcgcacacgtgcgacaaaccctcaaacaatccgcaagcagaaagaagagttaatagatattcttgataagttaaaggctgccaacttcaacactgtcctatttcaaacccgtactcgtggagatgtattatatccttcggcaatcgaacctttcaattcgatcctgaccggaaagacaggaggaaacccgggatatgatccgctggcctttgccattgaagaatgtcataagcgagggatggaatgtcatgcctggatggtaactatcccactagggaataagaagcatgttgcttcgctcggcagtcagtctgtcaccaaacggatgaaagaaatatgcgttccttacaagcgcgaatatttcctcaatccgggacatccggcaacgaaggagtatttgatgaaactggtgcgggaagtcgttagcggttatgatgtggacggagtgcatttcgactatctgcgttatccggagaatgctcctctttttcctgataaatatgatttccgccgatacaataaaggacgcacactggatcagtggcgccgggataatatctccgaaattgtacgttatatatataaaggtgtaaaagctatgaagccttgggtgaaagtaagtacctgcccggtaggtaaataccgtgatacttctcgttacccgtcccggggatggaatgctttctttaccgtttatcaggacccgcaaggttggatgggagaaggtattatggatcagatttatccgatgatgtatttccagggaaacaatttctacccttttgccctcgactggcaggaacagagcaacggacggcaggtgattccgggactcggcatttattttctccatcccgatgaaggcaaatggacacgcgacgaaatagatcgtcaaatgaactttatccgcaagcagaaaatggcgggtgaagggcattaccgggtgaaatacctgatggagaacacgcaggggatttatgatgaattatccgagaatttttatgcataccctgctttacagcctccgatgccatggttagataatgttgcgccaactgctccttctgtactgaaagttactcacattgataatggatatacggaattaacctggcaggctgctactgataacgatcagcgcaacaagcccatgtatgttatttatgcttctaatgattatccggtagatatcaaccgaccagaaaatatcgttgcacaaaatattcgagagacgagttacgtatatgcccctatcctgccttggaatgcaaaaaagcacttcgcagtgacggctattgaccgctatggaaatgaaagtacagcgacacaggagcaaacggtccagcagtaaaccaagtatttagaatcgacttatttgtttcaaaacagtataaaaaagaatgaaacggtgcagaaatgaacgaaagtttttcctactataaagttgaaaaacataaaaacatctgccacctgcaaccaaacgcatgtaatacagtagttaataagtagttagaacgtggcagatacctgtggcagataggttgcagataaagtatctgcaacacgttatataatcaaagaaaaagccttgattcctttatgcaaagctatgggataattgggatcactctatggagaaatgatagtgtctctacggggaaacgacagtatccttacctagaaactgtagtgtcccgccttagaaactctcgtttcctgccgtggaaactgtaatttctaatgccggaaacgacagttccccgcctggaaacgggaagttaatgtatacaataaacttttgcactcatggagaattagtttatgtaaggtttatactgtgttgcagatactttatctgcaacctatctgtcgcaggtatctgcaacgctccaactatttatcaactagtgcattacacgcgtttggttgcaggtggcagacgttttcatgttttttcaactttatagaggaggattacgcattaaaattagggtcacaaccgtaagtcataaaacaaattcacctctgtgtcctccgtgtcctctgtggtgaaaaccgtgcaagaatgagctaaatgataattttccagttaaacaaaattataacgcccgttctttgagatattgaaaacgaaatattacgaaaataatgattatctttgaaccactaaaaggaaaataacaatgaatgacctgcttcgtaaactccctatcgggatacagacctttgagaaacttcgtaagggcgattatctatatgtagataaaacagagcttgtatggaaaatagcttatacatctactccatacttcctgagtcgtccacgccgttttggtaaaagtcttcttctctctacctttgaagcctactttgaaggaaagaaagaactcttcgaagggcttgccattgaaaaactggaaacgaaatgggaaaagcatcctgtgctgcatctggatttaaatgccgagaagtacgattccccagaaagactttatgatatcctcagccgtcaactcaccttatgggaaatccaatatggcaaaggaatagacgagaacactctttccggtcgtttctccggcgtcatccgtcgtgcctacgaacaaaccggtagcagcgtcgtagttctggtagacgaatacgacaaacctctattgcaagctttaggcaatgatgtcttactggatgaataccgtaaaactctgaaagccttttacggagtattgaaaagtgccgaccgctacctacgtttcgtcttcctcacaggagtaacgaaattctcacaagtaagtgtattcagtgacctcaaccaattgcaggacatcactttatggcccgattacggaaccctttgcggcatcactcttcaagaattattggataccttccagccggaaatcaagatactggcagccaataattccatttcttatgatgacgcggtacaacgaatgacacgtctctacgatggctatcatttttgcattaattcagtaggtatcttcaacccgttcagtgtactgaatgtcctgaaatcaaaagtgttcgacaattactggttccagaccggcacaccgactttcctcgtcgagatgctgcaagaaaccgaatacgacctgcgtactttgcttgacgggatcgaagcaccgtcttccatgttctccgaatatcgtgtagattccaataatccgattccgttaatttaccaaagtggctatctgacgataaaagatttcgatagggaatttggtaactatctattgcaatttcctaatgatgaagtccgctacggcttcattaatttcctggttccattttacaccggagtgagaaacagtgaccaaggattttacatcggcaagtttgtacaagaacttcgttcgggagactacgatgcctttctcacccgcctgcaagccttctttgccgatttcaactacgaattgaacgagcagacagagcgtcactaccaagtggttttctatattgtcttcaaacttatgggacagttcaccgatgccgaagtacgcagcgcccgcggtcgtgcagatgccgtagtgaaaacacctaaatatatctatgtcttcgaattcaagctgcatgacacagcagaagcggcattgaagcagatcgacgataaaggctatctgataccgtatcaggcagacggacgtgaagtgataaagatcggggtagagttcagtgcggaaaaacgcaatatcagtcgctggctggtgtgaacagataaagttaaatattatcaggagttacccatatccacgcccgataacaacttcttctatgaacaggaaccaaaggtaaataaccggagtacactctaccttccctgatctccaacggataagttgcggacattcgttcatgttcctgcaaggcttcaccttccgaaggatgataatcaatcacaaaacgccctgttgaatcagaacgtacataacggtcatataaaaaacgcgcaacaactcccatattcatgcgcagattaatttccacacagggatgaatccgaaaaaacagcttttcattttccggaaaccgacaaatcatcatatcaactccaagataacctttataaacggttcctaccaacgcagaaagcctgtatttcaaacagttctccaaatccgtcagaacctttgaagggacatattgcgaaagttgtttccagattgcctcattagaaagcaaacgattcccttcatacattccactctttccggtatggaagagggaatatcccataaatgtcacttcacctgtaccatcggaataaaactccatggcaaagtcttctaccttattatacataggttccgcaatgattccaccctgcgaagcagccacacgcgtacaccaaccggatataaaaggagtaaatatgcctttacaccagttcaagcctttaccgcttcccgaaagcggagctttcaacaggcagcattcccgctcttccacaaaggttttccattcttcttgtgtcttcaaataataagattctccgcagaaatattcattcagttgtaattccggaagcaatgagacggctttagaacgatgggagtattcccgcaaaccgtctaattgctccatagaaggaagcagggcttcatccatgcccagccctgaaagccgtttccgcaaagctacatcccatccccaaggacgaatatccaaattcggttcaatagcaagttccggctctgtcatcaaatcaaccgaaagtcctaataattcctgtatcttcttcacatagccgagattataagcggaaggagctaatacagcactcccctcctctgcataccacatcggaagcaaagccaactcggaagccatacgtctggccgaagccggagccatatagttcgtttcaccgctggccaacgccaagtcatgttccggattgaatatataaagagccttttttgtcatttcaaatgaattcaaaactttattctgcaaatatatacaggaaatagtcaggaatgactacaataaacagaaagttggaattaaacacacaattttgccatctctactttgcaaatcctaaaaaaagcagtatatttgccacccgaaaaacaaagaactgaaatggaatcattctaccgcacacacgcctacctcgttgagcacaccaatgcccccgttcgccgcgatcttatggacgagatcgactggagcgaccgcctgattggtatcaaagggacacgtggcgtaggaaaaaccactttccttctccaatacgccaaagagaaattcgggaacgaccgttcctgtctgttcatcaacatgaacaacttctatttctcgggccacagcattgtagacttcgccaacgaatttcagaaacgtggcggaaaagtattgttgatcgaccaggtgttcaaacatccggaatggagcaaagagttacgcatgtgttacgaccgttttcctaacctgaaaattgtcttcaccggctcgtccgtgatgcgactgaaagaagaaaatcttgaattacgtgatatcgccaagagctataacctgcgtggattctctttccgtgaattcctaaacttgcaaacaggcatgaaattcagggcatatagcctcgaagaaattcttagcactcacgaacagattgccaaaggagtactctccaaagtccgtccgcttgactattttcaggattacctgcaccacggattctatccgttcttccttgaaaaacgtaacttttcggagaatctgctgaaaacgatgaacatgatggtggaagtagatatacttctcatcaaacaaattgaactgaaatatctttcaaagataaaaaaattactatatttgctcgctgtcgacgggccgaaggctccaaatgtgagccaactggcaagcgacatacagacatctcgcgccacggtgatgaactatatcaagtatctggcagatgcgcgactcattaatctggtttatccgaaaggggaagaattccctaaaaaaccttcgaagataatgatgcacaactccaacctgatgtattccatctatccggtgaaagtggaagagcaggatgtgctcgacacattctttgcaaattctttatggaaagaccataaggtacataaaggagataaaaacgtctcttttatggtggacgaagtaatgccgttcaaaatttgccaggaaggcgcaaagatcaagaacaatccgaatgtaacgtacgcgttgcataaggctgaaataggtcggggcaaccagatacctctctggatgttcggctttttatattaaaagatttatttacttaaatatttaatttagttatgactaaacagaagaaattcatcacttgtgatggtaaccaggctgcagcgcatatctcgtatatgttctctgaagtagcagctatctaccccatcactccttcttcgactatggctgagtacgtagacgaatgggctgccgcaggacgtaagaacatcttcggcgaaacagtattggtacaggaaatgcaatctgaaggtggtgctgccggtgcagttcacggttctcttcaggctggtgcgttgactactacttacactgcttcccagggtcttctcctgatgatccctaacatgtacaaaattgccggtgagttcttgccttgcgtattccatgtgtctgctcgtacattggcttctcacgcattgtgtatcttcggtgaccaccaagacgtaatgtcagctcgtcagactggctttgctatgttggctgaaggctctgtacaggaagttatggatttggctggtgttgctcacttggctaccatcaaatctcgtgttccgttcatgaacttcttcgatggtttccgtacatctcacgaaatccaaaagattgaaatgttggaaaatgatgatcttgctccgctgatcgaccaggaagctttggctgaattccgtgcccgcgcactgaacccgatgaaaccggtagctcgtggtatggctgaaaatcctgaccatttcttccaacatcgtgaatcatgcaacaactactacgaagcagttcctgctatcgtagaagaatacatgaatgaaatttctaagatcacaggtcgtaaatacggtttgttcgattactatggtgcagaagatgcagaacgcgtaattatcgctatgggttctgtaacagaagctgcccgcgaagctatcgactacctggtagcaaacggcgaaaaagtgggtatggttgccgtacacctgtatcgtccgttctctgctaaacacttcctggctgctgtacctaagactgctaagactatcgcagttcttgaccgtactaaagaaccgggtgctaacggcgaacctctttaccttgacgttaaagactgcttctacggtgcagaaaatgctccggttatcgttggcggtcgctacggtttgggttcaaaagatactactcctgctcaaatcctttcagtattcgaaaacttggctatgccaatgccgaagaaccacttcactatcggtatcgtagacgacgttactttcacttctcttcctcaaaaagaagaaatcgctttaggcggcgaaggtatgttcgaagctaaattctacggtttgggtgctgacggtacagtaggtgctaacaagaactctgtaaagattatcggtgacaacactgacaaacactgccaggcttacttctcatacgactctaagaagtcaggtggtttcacttgttctcacttgcgtttcggtgataatccgatccgttctacttatttggtaaacactccgaacttcgttgcttgtcacgttcaggcttacctgcacatgtacgatgtaactcgtggtttgcgtaagaacggttctttcttattgaacacaatctgggaaggtgaagaactggctaagaacttacctaacaaggttaagaagtatttcgcacagaacaatatttccgtatactatatcaatgcaacacagattgcactggaaattggtttgggtaaccgtaccaacactatccttcaatctgcattcttccgtatcacaggcgttattcctgtagaccaagctgttgaacagatgaagaaattcatcgttaagtcttacggcaagaagggtgaagacgttgttaacaagaactatgctgccgttgaccgtggtggtgaatacaagactttggctgttgatcctgcttgggctaaccttccggatgacgcaaaagctgaaaacaacgatcctgcattcatcaacgaagtagttcgtccgatcaatgcacaagacggtgacttgttgccggtatctgcattcaagggtatcgaagacggtacttggtatcaaggaactgctaaatacgaaaaacgtggtgtagctgcattcgttcctgaatggaatccggaaaactgtatccagtgtaacaagtgtgcatacgtttgtcctcacgcttctatccgtccgttcgtactcgacgctgaagagcagaagggtgctaagttcgaacaactgaaagctgtaggtaaagcattcgacggtatgacattccgtatccaggtggacgttctcgactgtctgggttgcggtaactgtgccgacatctgtccgggtaatccgaagaagggtggcaaagcattgacaatgaaacacctcgaaagccaattggctcaagctgaaaactggacttactgtgctgaaaacgtgaagactaaacaacatcttgttgatatcaaggctaacgtgaagaactcacagttcgctactccgttgtttgagttctccggcgcttgctctggttgtggtgaaactccgtacgtgaaattgatttctcaattgttcggtgaccgtgaaatggttgctaacgctaccggatgttcttctatctactctggttctgttccttctactccgtatactacaaacgaaaacggacacggtcctgcttgggctaactcactgttcgaagacttctgtgaattcggtttgggtatggaactggctaacgaaaagatgcgtgctcgcctcgtgaaagtgatgaacgaggctattgctgctgattgcactcctgctgaagtgaaagaactgttcgctgaatggatcaacaatatgctggatgcggacaagactaaggaattggctgctaagatcattccggttgttgaagctaacaaggataaatgtaaccactgcaaacaaatcgctgaactgcaacaatatcttgtaaaacgcagccagtggatcattggtggtgacggtgcttcttacgatatcggttatggtggtcttgaccatgtaatcgcttccggtaaggacgttaacatcctcgttctggatactgaagtttactctaacacaggtggtcagtcttctaaagctactccggtaggtgctatcgctaagttcgctgctgctggtaagcgcgtacgtaagaaagacctcggtctgatggctactacttacggttatgtatatgttgcacagatcgctatgggtgctgaccaagctcaaactctgaaagctatccgtgaagctgaagcatatccgggaccatctttgattatcgcttacgctccatgtatcaaccacggtctgaaagcaggtatgggtaagagccaggaagaagaagaaaaagctgttaagtgcggttactggcacttgtggcgttacaacccggctttggaagaagaaggcaagaacccattccaattggatagcaaagaaccgaactgggaagatttccaaggtttcttgaagggtgaagttcgttacgcttctgtaatgaaacaatatcctgctgaagctgaagaactgttcaaagctgctgaagaaaacgctaaatggcgttacaacagctacaaacgtttggctagagaaaactggggtgctgaataatagtaataccctataaatataaagcggtaatcttgtagaagattaccgcttttttattgtatgaactctgtctaacataaacaatactccctttttcccactagagttcatgtctattttatatttaaaattaagaatcacaatgctccaatctatttattctctgacttcggaatccaactatccaccaactgccgatgttcatccctccatttacgggctatttcttcttcatccatccgggcatccttcatagctgtcataaaagagctaagttcttctgtcgttagtttgatgttgccaaagaattcggcagcaaacggatctttctcactgaatcctttccatgcaatagcatgtatttcttccaagtctccatatactttcttcggatcatccaagaatttcaagtcaaactggtcgaacatccaatgcggtgtccaccccgtgatgacaatccattctcctttgtccatcgcttttttcaaagaagccagcatggtggaactacttgaagtcatgagggtatacccatcaagtccataagcagcaatggccttatcggtcgtcttcattatccctgctccggcatcaattcccactatttcggaagaaaaacggtctttgttagcttccagctcactaatagactggatcgtaacatattgaggaacaaccagtcctacacgggcttctccatatacctcacccagaaattcgatgctgtctccatactgatccatataatctttcatcgttattggtaaccaggcatccagaaacacatctgatttctttcctgacatagatacaaaaataggggcaagatcagcattttgcaattcaacctcatatccatgttcttccaataccaccttagccaaatggctcatggcaataccttccaaccaattggcataggctatttttactttctttttctctaagtctgaattagtacaggaagccagcaaaagtatagctgacaatactattcctactattttatatattctcatacgtattttatcctttccgtttagttcttattttttcgtcctgccattccttgtgtgatacggtctaagatgatagctaaaataacaactgcgataccaccttcaaacccaagtccgattttcatttgggtaatacctttcaatacaatttctcccagaccaccggcagcaatcatggcagcaatgacaaccatagaaagcgacatcattattgtctgattgacacctgtcaggatggttggcaacgccaaaggaagctgcactttatacaataactgccaacgggtagccccgaacgaacgggaagcttccactacatttttaggaacttgccgaattcccaatccagtaaggcggaccacaggaggcatagcaaagataatggtggcaaacactcctggcactgctcccaatccgaaaaacaaaacggcaggaatcagataaacaaaagcaggcatcgtctgcatcaagtcgagaacaggacgaagtattttctctgcacgcggactgtttgccgtccacactcctaaaggtacacctacaatcagggccagacaggtagatgaaaaaacgagagccaaggtttgcatggtagcctcccaaaatcccattccataaatcagtaataatcccaatgcggtgaaaattgccgtaccacgtcctgccttcatccatgcgagtgcagcaagtaccaggatggttatataaaaaggtattccaaaaagtacgtgttggaatcctataataaaactaccgatgcctgcatttacggcatcaaagaaagtggaaaaatgtaccatcatccaattgatggccatctctatatattgtcctatatttatcataaatctattgcgttttgaattatttcgtttatttcttctttatctttccccgtcacttcgatgattaaggaggaaagcgggattgttcctaaaaactcatgcgtctcatcaatcacccataccggcgaattgctctttgtcattaaaggaagtatatcctccaacactgtattctccaatacagaatgtacttcggtacggacaatcgtttcaatggatttttcctgtctgctacgtaacttaagcaggtcgttcagacgtacttctccgaccagtttatcatcggcgtctatgacaggtaatacggtgatattcttcgcacgcatcttacgaatcaatacttcaggtccctctttcttcagacgggccaccagtggtttgtcaatcattaaagaagaagcggtgataattttactcctgtccacgttttcaacaaaacgggctacataatcgttagccggttcggtcagtatttcttctgaagtacctacctgcaccacctctccgtctttcataatggcaatacggtcgcccagtttaatcgcttcactcaagtcatgggtaataaagacaattgtttttttcatcttcgattgcaaagccaacagttcatcctgcatttgcacacgaatcagaggatcgagtgcagagaaagcctcatccattagaagtacttcgggattattagccagagcgcgggccagtccgacacgctgttgcattccaccggaaagctcgcctaccatctgattttcatatcctttcaatccgacaagcttcatactttccatcgctttcttctcacgttcctctttcttcactccctgaagttcgagaccgaacgcgatattgctcaatacggaacggtgaggtaacagaccgaaattctggaaaaccatcgccaactctttccggcgaacttgcaataactctttttcggatattttagatatatctactccgtttacaagcacttgtccggcagtaggacgtatcagacgattgatacaacgcagtaatgtcgattttccacttcccgagagtcccattatcacaaaaaactctccttcattaattgaaagattggcatctttcactcctaccgtacaaccggtatctttcagaatttcctctttactcttatcttttttcaacatcttgagtgctttctgcttctcgtgaccaaagataaggtacaaatcctttatttctattttactcatataatatattggtttagattataatatttgttttgttttcaactgccgcgttcctcattctcacttacgataaacaagttgaatgttcgcatggttcaatcatgtcacatggtaacatgacgatccgacgttttttaaatggttaaagaaaacagactaagtagtttaaaaggaatagaatttgataagattatcctctcaatgaacagtagaaaacagtattttcataaataaataacagtctgttcttgcatattgttggcacaaagataaggaaaatagattaaatatgcaaatttcattcagatacggagtaattccagagatgctttttcaagtctacgcatccattttgcttgaaagagatcccttcttccaacaagagttgtttctgctctgtccaatccggaacaaggcgtcccgatgcattgacaacccggtgacaaggcgcagataaatcatccggaatctgtttcaaagcacgccccaccatacgggaacattgaggcattcccaataatgcggcaattcccccataggtagaaactttacctaccggaatttcccgaacaacctgatacacctcttgacaaaaggatgcggagagactcgctttgtctactttataatctttcatcactcaaacattactttatttcagttccaaaactagataaaaagaaaagaatttgcaaataataaaagcatttcaaataaaatatgcaactttatttgctttatttacaaataatcccgacctttgtacccattaaaagcaaccctattattaacaaaacaagcactgctgttatgaaaaagaaaactatcctgttcgcttcttgtttattgggagcactggctttcagctcctgtgagaagaacctttatgatgaaagtaaacaacccgagaaagaaaagaagatgactgacttggaagtacctgccgatttcgactggaaaggttctcaaaatgccaaagtgaaaattgccagtcaatcaactgctactatttctgtatttctagaagaaaattgcaatgaagaggctttgatgcttcgaatggatgtcgatgccaacacatcaaaattggaactcccaattgaaattcctgcatatataaaaaatgtgtatgtaaaatatggtaatggctctgaaatacaaactgttcctgttgaaagtaatggtactatttccatagtagtacctgctaacgctacggcattatccagagttaccacaagagctaataaagaagttgaaacgaacaacatcttcaattatccgggatatggcaacggaactattatgttcgaagatatgtatccagctttaggcgattatgattttaatgattttgttgcatggtataatttccaaattgacggtttttattggagtcacaatcaatgttatgcagaatacttaatgataggattccaaatcagagctataggaggtatatatgactacaatccttatatccgcttggcagaagtacaatataatgaacttgatttagaagaaactcaaatgtatcttgagcgtaacaatcctgaagaggctgaaaatatcaaaatcctaaaaggcccaaaaggggaattgattatttcactaaagaaaccggccattcctaacggatacaagtattataatacggaggtaaatgaaaaaacaaagcctaaaaaaatgatggccatttacttggtgttcaactcacctgttaacgttaaaagcctacaagacagtaaaatggacttttatattgcaaaaactaataaaggacaagaaatccacttaaaaggttatagcccggtttattataacagcaacgaaagttatgtaaatgaagacaactttatatggggattaaaagtacctgcatctttacatcatgccagagaagaagtaaacttcttggaagcatatccagactttgaacaatgggtaacatcgggaggtcaagagaaccaaagatggtggaataagccaaaaacgaataagttgattatgaattaataaatatacagtaaatcatatactgaattaaataagaggtaaggtatgtcaatagatttccttacctcttatttttatcatatgaattccatagaagtataaacagataaatgctcaccaccaaattttgcagattctatcctatcctttcctcttcaacaaatctgtcggactctctccaaactgttctctataacatttagtaaaataagaaggagaactaaaaccaacttcataaccgatctctgccactgtcatatccgacgaggcaagcagagaagcagctttcttcaaacgagctatacgaagcagttcattcggagaataattagtcagagatttaatcttgcggtaaagttgcacacgacttaatcccatatccttacccaaatcttctacattcaaatttgaatctcccatctttgcctcaatcagagctttgaatttttccacaaagtctttatccatatcacagacatcctctttcgccaacgtttgtccgtcaccaaaaaactgtttcaggcggcggtgtgaatctatcagattacgaacgcgtgccaatagtaattgcgaactgaaaggcttggagatataagaatctgcaccaccatcatacccttgaattcgttgttcatccaaagaacaagctgtcaataggataacaggaatatgacaggtttgtaattcgcttttcaagcgacgacaacattcaattccatccattccgggcatcattacatcggagataatcaagtccgggacatatttcatagctttacgaataccttccgagccgtatgcagcttctataacagtataatcagtgtgaagcaatccatgcacatataagcgaatatcagcgttatcatcaataatcagaacgcaaggtttggaagagtcgtaacttttttccaattcctcttcttcgtaagttaaagcatcattcaagctcgaagaaccggaataaccagaagttgcaggagttacgggagccccagcaacggcagaggttgcagcatcggtggaggttacagaagtagcagggacagagaatgccggagagttttcagaaacaacagtctcgcaagtctgtacaggcaaatcaacggtaaagatagttccttgcttttcatcactttccactgtgatggtacctttatgcaattccacaaaagcctttaccaatgccagtccaatacccgaaccggcatggtgcatatctatcttatagaaacggtcgaaaatattccggatatgcgccgcagaaatcattgagccggtattggcaacagtaaagcgaatccaacaatgatcgtctttagtcagggaagataagcgtacagttacttttccattctccggagtaaatttgaaagcgttggaaaggaggttgaaatagatgcgttccaacttttctacatctgccaatgtgcggtaatccgtatccggcatataatcgaatgagaaatgaatatgtttcttccgggctgctgccatgaaagactcgttccatccctcaaaagaagaaagaatgtctaacgaaataggagtatattccatttttccattctcgtatttacgaaaatccagaatctgattgacaagacgcaagaggatattcacgtttcgctgaactaacaataacattcggcgctgatcttcactcaaagacgaatcagccagtaaatgctctaccgggtcggcaactaatgtcagtggagtacgaaaatcgtgagatatatttgtgaagaaaaccagcttggcatgagtcgcttcttccagttgatgagaaagctggataagctgatcccgctgttcttcgagtttgtcacgctgttcttcaagaatatcccgttgctcttcgagtttatcgcgctgttgctctacttgtttcttctgttcggacaactctttattcaggcgattcttggaacggagggatttatagactaccaacaacaatcccgctactaataaaagaataaccaagccgccatacatcacgacctgctgcgtagctacacgcgacagatacccaccgatacgtccgttcaatgtttcaatcttctgatccagttccgagatatgggtagtctgaagttgcataacgtgcgcgttcgtgcggtctacaacggcagtattcatgaccgtttcgcgaggataagacttcttctcaagaatattcatggccagttgcatcactttgtccccattagtcggataaataaaagttgcatcgagcacattgtcaagcaccaattcaagcccgtttcctttgccgggcagggcatcaatgccaacaaaaatcatttccttttcacgtccggctttcttcgcagcttgataggctcccggagcgatacggtcgttatgtgcatataccgcatcaatcttcggatgacggcgaagcatactatccatttccacttctgccggttcacgttcccaggcagcatccgctttatcaatcagtttgatatccggataattgctgatagcagccataaatccctgatggcgttccatggcaggggtggaaccactcagtccggtaagctccactacattccctttccctttcagacttgatgcgatataatttcctaccgcacgacctatttcataattatcggcaccgatataggcagtatatttatcagaaagtatcttccggtctacaagaatgacaggtattcctttctgataggcctcctccacaattggagtcatgggagccgcttcattggcggaaattatcagtaaatcaactcctttatctataaaataatgaacatcttccgcctgcttacggttatcatccgccgccgagcggatttcaaccgacactccatcataaaacatcgcttcgcgaagaatctcatcattcatcttgtgcctccaagagtcatcgctacattgggccaccccaatacggaaacgaggcgcatcctgccgacaggccgccaagcccaaaagacaaaacaagactgttatccacttcgtatatttcatcgcttcaatcattccctttctttcgtatatcttttgtatttctttctgtaatccaaatttctctccccgcattatttgcattcaccaccgggaaatacatcagttccactttcacagggttcagcgtatattttccagtaaagcgtggaagcaaaggaaccgtaaactgataagtacctaccggtaatttttcgctaaagataacagttttctctttaaaatactcacgatatacttcagaacgggagaaattaacaggttttgaggcataactacaacctgccggaacaggaacttcgagcatcacatattgcgcaccctcctgtttcacctgcaaggtaactgtcaatgtaacaggtacacccgccaccaaagagtctttttccaaagtcacctccaccttgaaagcatcactctgacgagcattcatcacacgcttcattgaatagacactatacaataaaggctcttttcccgtttttgaaataagcagactgtcgcctgctgtcagccgggcatgataaggaaattccataattcgttgatgatccttaccgctcacagacaccgacgttcctgacatccctccggaacctgccagcaaatcggtcagaacagttgccacagccgaagaagcctgatacgtattccatccgcgctccttagtccgcaaaatatacaattgcatattttctttcaacttacacagggaagggtcatttttaataatccggtaggctatcaatgtatttatcatctgatttccctcccaataataagtacgccgtccgtcgtcacagtaaacaccttccagcatatcctttttcagataaggacgtacgctatcacccacattcaccgaatccacctgttgcttgatttcccagagaagcagcttctctttcaagtatgaaagaggacgataatacttgtttctatttgccaacgagtcttctttctgttccaattgccggacgaaaggttccaataatctgactgccgaagaataatccgcctctactttccactcatgcagagcatgaagtatttctatatcttccagtttcattcctcgataaggacgcgtatgagcatactccactttcaaaccattcagattcaactccacaggataacctgcatcttgcgccatcttcaaagcccgcagaatatgcgcagacatccagaaagaagtattttcagagttcccccaccacgaccataactgatgtttgttctgatgattcgtcagtcgatggatgatagatcgaattgctttatctactttcaccttttcacccttactctgcatatactgttggtaagccaacaaaccgattaacttggatgccagctgctcattgcacaaatatttgtatcctgtcaagtaattcactgattctttatagatgtccaactgattgtcagtgatactcaccatcacttcttcatcctcgccggattgcactttgaccgtctttgcatcggacagaatacccaatgtgccctgtgccaattcagttccctgtggcagtatcggaatcgtatattcctctccatcctgatagccatcgtcgcgagtgaaaagatagctgatggtcacgctatcggcatgaactgcctgcatcggcactgtttcatgaaatccctccatgaaactcacttcctgccgtttcaacgtatccgttccgacgcagaactgtgtctttccggctatgtgctgcccatccagataattgcggatagtcccgaccaccgtactctgatccccctccaccaggaaacagggagttttcaactccgccatcaacggtttgtaagagcggacgaaacgtcggaaagtacccgtctgcaaacgacggttcatgccataaacgacagtttcccatttcgtcacattatcggggaaagttgtttcaaactgtaccgttccggttttatccgtaaacaaacgaggctgccagaaagccacatccgaaaaattcctacgtaagccattcaattgcatcagttcattatacaactgttcgttatccgcttcttctttcgctttctgatcttgctcttccagtttctccaaaggtgcggttgcagcagcagaagaagaacttaccattaatccggcaacagcccccgtcaacgaagatcttgaacgcatgccgtatcctacaacgaccacttcctccagcgcctgactatcttcttccaaagtaaccaacagattggctccgggagttgctctcatctcctgctgtttaaagccgacataactaaacaaaagctgatcccctcccctgtcacaatccatttcgaaatatccgtccatgtcggtgatcgttccctccgtcgttcctttcaccaccacgctgcacccgattaaaggctctccggtagcatccgttacataaccggagactttaccgccgtaattgcgtacatactgcctgatcctcatttccctgtgaccaggaaagtttgtaccgatcctgccaattcctcttcccagcaagagccaccctgctgacaacgaatcgcgttcgtgtagaggcagagattccatatctacatccagataggtatatgattgtatcgtcagagcatcctgtttcagatactttccattgttataaagcaaaatcgcatcatacgttccggcaggaaacttggaatatattctattcatttgcaccaaggtatccggataaaccagttctccggtagtgcagtctttaaagagcaagttagccactccggtagaatctttttcttccggaagccggaaattcaacgtcttatccggcagggagaaataaatccgggtgggatgccaactctttcccttgcgaagttcggccaccagactacggaatctttccggtgataaatggtaatcattcaaagtcggaatctttgccacagacgaaaaattcagataagccgggcacagttcctcatccttatatttataaaccacattgccctcgaattcataagagaaacctccctcgtgccgatacaacacaccattcatatatttccaaggtcccgcctccacaggacctgccaatatctttttcttgtagcgcgacagctccatgagtgaaaccggaaacagctttccattatgtttgagcgaagtatataccgccccatccatcactggaagacggcaaagataccgttcataacgcttcttctcttccgaagtaaacttatactcatcatatttccctttcctctgccgcaaccagactacttccactccttgcggcaactgattcatatcgaaacttaaaatcgttttcttgccccggtcgaaagccagagaatcaatgatgaaagccctgtcgtgcattcgcaacattatcttctgctttcccgacggatgcaatacaggaaaagaatactgcttaggctgttccgtccacgaaaaatagcagggaacatcgttctgctcaatcacatagatattcaccgcccgcccgttcagcatcacataaggagcaaactgggtggttccatccggtgtatcaaccgtctgacggaacagatttcccgaaggataagcaaactgataataaggcaacttatccaaatgaagcaactggttccaatgctgataatccaatgtgccggtatgtagataccctttttgcttcattgagtaggaagcacgttgctcgcgcggacggggtgcactcccgtaatagggtaaatcgggtacgtgataatccagctgcgtgttgaccgcaaaagctgtcagatcgacgttggataccggacgcccttgtatattggtcacgttcaattttgttttcactttctgaccgggatacactcgttccggcaaatcagattcaatcaccagccgttcggaaggtgaagtgtacgagcgtttcaacatacattccttatcccccatgaaataaaatacttctacgtaatagacggaagagggatcaatctctccggatttgtgttccatctcttttcccgaacctttctgcaacaggcggttgccttgatacacataccaggaaagttccagctgcaaaggattggaaagggagacacagaacgaatctttttctatgccgccattcagttccagtttggagtcaagtgcggcggaagcaatcgtcgtttcatatcctgtttccggtattttgaaacgatagtccgtcaccgcctgattgaacggttcgcgatagggcaaacgcactttcttcacttctttcttttcaccataggtcagttcggccgccacaggacgctccactcccaggtcgaagaatgaaaagcaaatagtatccgcctgcgtagtgcactgcatatcatagcacgaatagtagaaagtcgctttgctctgctgctccaaacggttattgtctgccgtaagcaaaactacattcaccgtatagaagcaatcggaagctccgaatatccgagcaggaatatctaccgaagctttcccggaagcatccagttccgcctgcacggacatcagtgtatcgggcaaagaaagtatctgcgcatacgacttcagtacctgctgtctgccgacagtcacttctacattcacctcccgcaaaggaagtccgttggcatccgttgcactgatatccatgcggttactctgcgatgcatattgcacattcgaagccagcttcaccaacaacttgtttccgttcagttcgtagtcttcatatttgaaattggtggaggctacgatgcgtccccgcttatcacgaagctgtacggtatatctctgatcgagcttcaggttcaatgaatccgccaacaggaattctccggcgaagcctcccggatggtaagggacgacggacattatcttcttatagtcacgccaggaagaaccgacacgcatccacaatgaaagttcctgtttcagaggacgtttatgttcggagagagcataagacttgaaacggacagtttcgcccggtctgtatttattcttgtcagtaatcaggtaactataaaactccggtgcatcttgccggtcataatcatttttataccagggtggtacaaggtgtttcctcaaatcgaataccgcacgaaacttatccacttcaaccgtcaaaatgtgctgttctttctgggaccagttatcgtcagtatatgtctgactgtcttcatcgtaataaacaaccttgctgcctacccgcactttggcatctttcctgattgtttccccggcatcaaccacctgcaaggtaagtacaccatactccttgaaaaggaaaacatgaaaaggaatcaccggagcataacggtaatgaacttcgttccgctctacatcagccagcagaaaatgccctttgaccggagggttgttccaagtttccgtgaaacgggcaaaaggagtctgctgtatttttttccactgtttctgtcggagtttgcctttgagaagtttcaaggcctctttgttggtcagttcgaaaacgatcgtttcggaagaggcatcgtcccagagcatcggttgtccgaatgctccattggcaaaaagcaggactcccaataacaacaggctctttagctggcatagcattgtgttcatggcattcgataaatagatagattgagaacaaaaatagaaaataaaactgtgagtatgctataaatcacccgattattcgcaatcttatcctctgaaaaaaagtaaaaatagtccccatacttacccaggaaaccattaacaaacgtataaagcgtgatacaaacacttaattgatgttataaaacatctctttttatttggattatttgcaaagttgacagaagtccgtatctttgcaatgtgtttttcatagtattagatttaaggttaacaaagattggagcaaggcgttgctcctttttttatgcctgtatctttcgtacgtacaaaaaacaagaggtacacccccacgaaatgaaatatacctctatgcttactatcaataaaagaattacatcagtctatctttcaaaacctgcggaagttcgggcatcgcaccgctctgtgtgcagacataagcagaaacctcgacagccagtttatgcgcttcgggcaccggttttccattgagaatggaagcacagaaagcagccgtaaaagaatcgcctgcacccactgtgtcggcaaccggtactttgggcgtctcctggaaagagacaacgcccggagtgaacacatagctgccattgattccacaagtgagaatcagcatcttcaggttgtattttgccaacagaatccagcatttatcctgcaaatcgataccgggataaccaaacatacggctgatagtcaccagttcttcgtcgtttatcttcaggacgttgcagcggcggaacgattcacgcaatacctcttttgagtagaaatcctggcggagattgatatcaaatatcttgagctgtccgtctatatcaggcatcgtatccagaaagcgattgatagtggcacggctcacgtcattacgttgagccagcgaaccgaagcaaacagcacgtgtgctcaaggccaaacgtttcagttcatccgtaaagggaatgttatcccacgccacgccctctttgatttcgtaacaaggcacgccctcgtcatcgagcgtcacctgcaccgtaccggtaggatagtctacctgttcaatctgcatcttcaacttcttctcgttgaatactttcagaatttcttctcccagttcatccctgcctacggcactcactacacgactgtcaaaaccaaactgtgatacatgataggcaaagtttgccggagcaccaccgattttctttccttcgggcaacacatcccaaagtgcttcgcccattcctacaattatattattcatgatatacaggttttattgtttccaaagttataaaattattttctgatacggaacgtataatacaaaagataaagcacgcccaccgtcattacggcgatagcaccattctgtcccatggaagtatccgaagccactcccattgccaacggaaacaccgtcccgccgaaaagtcccataatcatcaagccggaaacttcgtttttcttacccggcagataaagcaatgcctgcgagaagatgacggaaaatacattggagttgccgaaaccaatcaaagcgatgcaagcatagataattgccttttcatggaagataaacaaaccgatcatggcaatcaacatcatcaccacactaatgccgaagaaagatttcggagacatcttacgcaagatgaaagaacccagaaagcaacctgccgtacggaaaataaaataaagactggttgcaaaagcagcatcatccaatcccatgccgatgcgctccatcaaaatcttcggggcggtagtattcgtacctacgtcaatgccgacatgacacatgatgccaatgaaacaaagcagaataaacggtttgccaagcagggcgatacattgtccgaaagtagacggtttgccctcttctttttcctcttcaatttgtgtgacattgagtagaagaatagcgatgacggccacaatcatataaatagggaacaggatgcgccagcctagatcgaaagtcggaatggcctgtgtcgctccccacatggcgatgtaaggtgccagaaaagaagctatggctttcacaaactgaccgaaagtcaggctactcgccaggcggtcgccacgcacgatattggaaagtaacggattcagagaagtctgcatcaacgcatttccaatgcccaggagggagaaggaaatcagcatcagcatatagctgtcgccgaaaacgggtagcaacagagaagcgaaagtcacaatcaaactaagcaatacggttttctgctgaccaatgcggctcatcagcatgccggtgggtacggagaaaatcaggaaccagaagaataccagtgatggaaagatattcgcctgtgagtccgacagaccaagatctgcctttacgtaattggaggcaatgcctaccaggtcaacgaatcccatggcgaagaagcaaagcatcaccgggattagtttggagagggaagagtttttactgttttccattattttatcttttatatgatgaattctgtttccatagggcggagcacataaccctatggcaatgtatgcatcagtcctttatatagttgatgtatctcccgttccttgttactttaaagctacggtcttgttgggttaccacggccgtggtagcttcttcccacggctgtgaagagttctcaccacggccgtgggaggatctcgtcacggccgtgacgaactaacagaactgtggctttgaagaaagtgtctccacactttagtagaactcctccactaggacagacgtactcttccataaggaaagacgtattagtctatagggaaagaagtattctactctaaagaaacgagaaaagagcgcatagagtaagaagaatgagcttatttcttcaacttgtagatcacaaacgaatctactttatacgctcctcctttactgtaaaagtcgatatgagtgtaaggttccgacgggaatacctgattagtcatcacaaaacgtccgccatcaccaaaggcttccacactggatttatcgacaaagagacggagtttcaattcgtcttttccactttcaatggtcgtccaggtcaacattgggaagttctcattgaaaccaacctccccgctcttgcggcggtccatcgagaatttcttttctttcatgtcatattgcatatccacttcttcgcctttgtcattgtagagacggaagccgattacatccgcatgttgattttcgatagtcagttctatttcgtatgcaccctcattgccggcaatcatgtctttgatggtacgtgttccgttcactttgaacgagcgtttcttggagatgtcacgcagtttcagcagttcgggagagggagccgactgaagataagtttcgccatctacggtgaataggctcaaatcgcgaggaacagagttcggactacggtattgagaggtaggaacatcgtttgcatattgccaattgctcatccatgcgatagcgatgcgacggttgtcgggagcatcgctccaagtcacggtagcataatggtctttcccccagtccatccatttggttttagagggtgattcgtttacaaattcttttccgttgaacgttccgacaaagtattgggtggcacttcctccgaaaggacctccgggattcaaattacaaagcaatacccatttcttttcgttcgtgccgtctactggaagttcaaataaatcaggacattcccaaacaccgccatgtgcaccttgtccttcaccgaaactactttcaaaggcccagtctttcagattggaagaagagaaaatttgcatttcctgtcctactgccaacaacataatccaacgttgagtctctttatgccagaatactttcggatcgcgaaaatcacgggcatcagacgtcaataccggattattttcatattttgtaaaagaacgtccattatctgtgctatacgcaatactttgtacttgtcgatcactattctgcgtataaattgcaacaatagcacccgcaccgaatccggcagtattatcagtatctactacggccgaaccgctgaaaattgtaccaagcgcatcaggggtaatagcatcgggacgatgttcccaatttatcaggtctttactgattgcatgtccccaatgcatattgccccatttggagccataagggttgtgctggtagaaaaggtgatattcaccatctttatataccatcccattgggatcgttcatccatccataaagaggtgagaagtgataagtaggacggaacttttcacgattgcccgtatcgaacgtgtcggacaatttcatttctttgcagcaaacagcggaaagtttaccccgtatcggatcattcgaacctaatttaaatttcaataatatgtttttacctgcatagtccgaaagatccagtggaacaaaatagtccactctgttcactgccaggcgaacatccgcaacgttcacctctttattattaacgatcatgctgacacgtacatcaggcatcacctcctctacgggtaaaagcaaataacgttgatttgtatttatatgtaccaggcaatgtccttcacccaaatcttttattaataaagaagaagtatcggctgaagcatccgaaaatgagaaaatcatcataaccagaattgtcaaaaaggtctgtacttgtttaaacgagaataatacattcatgtcagatggtattagagttaattattaatattcattgtcttctatttgttaccatgcaaagataggcgtaacggatagttacacctatcacttttgtttcagaagatagaaaaaatgttacctatctatttcttagcgcttagataatgcaatatatttttcgtcatgagcacaatattatcttgataaacgttaagattactattctgattccattcataagcagcgagcccaagggctatacatgtaccttgatattccgctgtcgaagcaaattccaccattccggcacaacaataatccgtcacgtgtccccacgttgctaaaacggtagcattgttttcttcttcaaatgcctttactatattccctgcattgggataaagaccggggaaaccataagaattcaagtcccacatacaattatggtcttcacgtcgtccgggaccgatcagcgggaacgtttcatgagagaattggtcggaagtaaccataccggcaaacactggatgactccgatgatcatactccattccgatgttggcattaatcgtccaaacgtccgcgccatctcctccttcaccatctgcaaatatccctggagcccgttcggtacgccccaatggcacaaccaactgagtcgcatgattactcaagaacagattccctccattcttataatacgtagtcaaggcagcgatcgcatcagtagacaaaggtaacttatcccatccggctccaatgcctacacggtctatatgcacccaaataacatcgtaaacagaaagatcttcactagtcaacatggcaggagtgacaactttaccattcacaaactgtttcttgaaccatgcataagaggctttttcatcatcatcttctatctcttcgggactattatacgttatcacataagctgcatttgtcaaatcaagcccggacggtttcaccttaatattttcttccgttactccgcaatctatcacttcggataattcgctgatataaaatacttgattactgtttttatcttctatcgtacaatctgcaaaacgattattttctccttccgcagcattcactgtagtgggattttctataccttcactccaagatacatttatggtgtttgacgtgaaatgattgtattcacctttcacatgaattaccccatagtcggcttctttgccattgagttgattatcgctctgatttaccgtgaacaagttatcacttaacaagttgttttgcccgcttaattcaaagaaagtcattttgtttccggtaaattcattatccgaaatattcactcggctacagccagtaaagttggcacaccaatcgtcattcgccgttagtttgttgtgagagaaaatcagattactttctcccgaaatacgtgcagccacaccgccttgcgatgaaccgaaagcagaattggtcaccatattttgtatgccaccattcatttcaatgccattcacaacatcggttgcatctatccgggctaatgtaatggcatcacatccttggagtttaacgccctgatacatattttccatcttaatattgaagaaatgcaggcggtcattgtcatgctctacatagattccggttccttggtggtcggctttccccacaagggtaagtccgcttacctccaccccgctaatacgatttttatgtccgcctatatcggcaacaggagcgacatgtaatgcatattcagcatttccaagtatcaaacgactgcctttagcgtcagcaacaggaacaaccgtttcatcattcacacctttcagtgttacgaaattgcgtgtaagctgaatggggctatccaggcgaaaagtcccttcgggaataagtatcgttcctccctcgggtgggagatcggctataatagcatttataagatctgcacaatcggtagatccgtcagtcggaagcccgaattgcgttatatctattatcttctgacctttacattcatcgcaaagcgcataagtatcgtcattactgcaagatgtgcccaacatcaggaacaatccgcttatcaagaatttatttattttcatggtgttactatattaataatggtataggatgaggaaattattctattatgctcaccttatcagatgatacacaattagagacttcagtttctgcgttcaccaagaatacccgatagctctccaaattatctataaagcagttcttgaacacgttgcctgttccttgagtggcatttacagctacagcatcagcataagcccattcacatgataaactgttggacacaaacgtattgttgttaccttttacattgattataccaaaatcatcgccatggtcgagcatttgattctgaactgctcctgtaagccaaaagatgttcttatttacccgattgttatcgccactcaacacaagaataccattatagtagcttttgaaattattaccttcaataacactattattgcaatcatcaagcactaaattttcacgtccatcagggtagacctgattattaaggaatgacagtttgttcactccctgcgctttacaggttatgccagtgggctgtgcacctaattggcaattctttataatcatattctcaccaccaatcagttcgatactattaggaagttcacatacccaacagttgactatctgcatattctttgcctgttctatcttgatgccggtatgcagatttatgccaataatattagaaagtattccattatcgctcgtgcctgtaaaatgtatgccgatgttcttggcttccgtcccccccgacaccatcagattcataatctttaaccccttcacgtctgtttctacttttatagctgcttcggcattgcgggccactagtttgcttccaccaccaggtcccagcagatcgttgattccattcacgtcaatattgctgcgcataccgggatttaatcccttaatcgtcacattgtgcttattaatcacaatgggagcatcaagtacaaaatcaccttcgggaataaccaccactcccccttcggaaggtaaggaggcaattgcactattaatggctttcgaacaatctgtctttccatcaccaatagctccgaatgtggtaacatcaccttcgatttcagtatgagtgccataacataacaggttatcatcaccgtcgcaagctgtgaacaagcacagacagaaagtgctaattaaatatctctttagtttcatcatatctatatttaaggaattcatattagttaaacttaccatatccagggttctgcacataattaccttcagagaaattatattgcgcattggggataggcaaatattcatctctgccacggacgaagcgagcaccacgataataaacgcgtttgttttgctccacaccaatgtaactgttcatagtttccgcagcaacaccccaacgtaccagatcgaagaaacgatctccttccatagcaaactccatgcgacgttcccaacgtagtgctttgcgggctaattcttgattccagccttcagaagggtattcaccgatcagataattagccgcattctgttctgaatcctcaaagtcttttacataagggctattcttggcacgcagacgaatacggttaatgattttgcgggcttcttccagtccggcagcttcacctatttctatcagcgcttcagccttccacaacaacacgtcggcataacggataatctgccaattgagatgggaagccccccaaggccaaccttggaacatctcgtcactctccggagaaatatagaagcgtttggtacagttgaaaccatattcgccactgttacgcacccaatttgctttacaaggctcggcagtatatgttttccaagtaatacccggacgaccggttacgaaatccaaacgaggatctacagttgcgtcaacattagtgagttcacttccttcgtatattccatagtcatcggtgttgaaggtatcaaacaaaggcaatccataggtatctgtcttataggcattgattaagttttggctgggcaagaaaaatccgtcaccaccataaggacctttaggggcgttgagcaaattactccagtttatattcccggcaccatcggtttcatcatccatcgaatattgtacggcaaacacagactctactccattctcatattccaattgatcgagtttctgaaaatcattcaaaagatcatacgtctttccttgtgcacccactttgtcgcaaagagtcaccacttcagccagcaactgcttatcaatagcaaccacttggttattgtcatcttgttgataggcctgatagagtatggctttagcggcataggcataggctatgttctttgtgatacgacctacttgagattgagtatcaggcaaatcgtcggcagcatcgagaaattcctgtgctattttacccaaaagttcttcacgggtatactggttgttggggatgtacttatagtcatcattttccacattttcatcaaaataaggcacttgcttgaaaaggcgaaccagttcgaagaagaagtgtgcacgaatcaccttcatttcagccttacgacttttaagtattgacaaagagttctcgtcaagcgtgttcattaccctcaatgcgctgttacagcgttgtaaacagcaatagagttgaaaccatttttcgtcggcattactccatgtagcatctattttaaaggtttcaagcagcgtgcaaaagtcaccgtcatttacaccgccaccgcctttataagcattgtccgaacgtacttcgccatacgtccaattcgtcattggtacccaatgcatctcacgattgggacctttcaatccggcgtaagccgaagttaccaggagttccacaccgtcagccgatgccaacaaatcgtcattgagtgtaccctgtggtttaatatcaagaaaacggctctcattgcaacttgccaatagtgccataacacctgctgcaaagatatatttcaatttcataatgttctgtatttaggataaaaattaaaaaccaagtgatagaccgaatgtataagtgcgaggctgaggatatggatagcccagtccttcagggtcggcacccgtataattagtcagggtgaaaacgttctgtgcttgcagatacacacgcaaattggaaagacgtgcttttttaatccacttatccgggaaagtgtagcccagcgttaaagtcttcagcttcacgtaagaaccatcttcgataaagaaagtagaactgcgtgtttctacattattgtccaccacagtcagtgcagggatgtcacaattataaactccggtttgctcataatcattccaagcatgcattgcatccatcagacgtacagagtgattacctgtccagccttggaataggtcggtataaaacttagagttattccatgcatcgcgaatcataccattgaagaatgcggaaagatcaaaccctttgtaagatgcaccgatatttaaaccaccgataaatttaggttgatcgctaccttgccaatccatatcggcagtattgatgacgttgtcaccgttaaggtctttgtagcgaatacgtcccacaccgggagctccaatctgtacatcatatttgcttagatattcatatacctcttgctttgttttgaatacaccatcggctttatatgacatccatgagccataaggttgtcccacaatggttttgtccacaccgttaccacctccccaggtatatttgataacatccggaagttcggtaatttcattcttataataagagatgttgaacgaaatgtcatacttgaaatcctttatttcatcccgccaagtaaaggttgcttccaccccgctgttatccatactggcagcattataccatttatatccaccttcgccaatcacacctatataaggtttttgaattagcataccagtggtcttcttttgaaaatagtccagagtcaagcccaaacggttatcaaagaaagcggcatcaataccaaagttcaactgcttggtctcttcccacttcaagtcgttgttacccgaacgatctttctgtacaccgggtacgactgttgcaccatcaccattgaagttgtatgaaccattggacatgttagtgtaataaaggttgtaagtagcattgttgtcaatctggtcattaccattaattccccatgatgcacgtaatttaaggtctgaaagccagttttgcgtacgttccataaatttttcgcgtgacattctccaaccagctgatacagaaggaaagatggctgaattgttccctttaccaaaacgtgaagaagcatcacgacgcaccgttcctgatatgaggtacttatcatcgaacgcatagtttaccttaccaaagtaagaaaccatagcataagtagaagcattgttacccacgctttttccttcggtcacggtgtccagatagcgatagtcaaggtcttctatcaccaatccgcgaccatacccctgcaaatgctcaccattttctttcttagcttcggttcctatcacagcactgatattattcttcccgaaatctatgctataattagccgtgttcgaccatacccattgtacactattatcctgtcgtacggtcagttcatttacatctaccttccgatcggcttcgctccattttgggacaaaggttgagttgaaaccggtagtataattcaagccaaattggctcttcaataccagatttttaataggctctacttccaaataaacattaccaaagatacgccagcttttgtgacgattattggcttcgttgtccgtcaagcgaatgggattcggtttatctcccaatatatccacataaccaccggcataccctccgttttcatcgtacacaggaatggccggatgctgcgcaataaccaattcttctataccggcaggattaagatgttccaaccaatggttcaccgagatgctttctcccacacgtactttaccatccacaaagcggaaattagaagctaaacgcgaattaaagcgttcgtagtctgtattacggcaaaggccatcttgattcatatagtttaaggtaagagccacattaccatccttaaatcctttagagagggaaagattataattctgcatcaaagctgtaccaaatatctcctttgcccaatcagtattgcccgactttatcttcactccattctggtcgaaataatattcttgcagttgggctttctctccatttccatagacaacactgtttggataggttccaaaagtatttttataggcttgccaataaacatcaccccattggtaagcgtcaagcatatcaataccaccggcaaaagtctgggcagtgagcgacatatcaaaacttacctttacatcaccttccttagcacgttttgtggtaatgataatgaccccgttggcagcctgagcaccataaatcgcagcagatgctgcatctttcaacacctgaatggattcgacatcattggaagagatgatagaagctacattgtcatgtgtctgaacaccatctatcacataaagaggggaagaattgttaatggtagtaataccacgtaatttagtatccgtgtttccaccgccgggtttaccatcagttgtcacgttcataccggctacacgcccctgcaaacctgacatcacattaccggtaggtatatccgctacctctttcatcttcactacggctaccgaacctgtcagactggctttcttttcagccatataacctgtcacaaccacctcatcaatcatcttagcatcttcttccatcactatcttcaaggaaggtttagcggcaataatcacttccttatatcctatataagaaatagccaatgatgcatttgccggtacactaagagtaaagtttccgtctaaatcggtaatagttccagttgatttagaatcattttgcactacggaagcaccaataatcggttgcccatcagtctttgaagtaacgtttcccttcaccgttatgttttgtccccaaaggactgacatgaaagtaaacaggaaacaaacgctgcaaagaagttttttgttcttcataatactaagcattagtttgatgttattaaattaaaagtacgaattttatctttatcgataatgcaaattacggttgatttacgtcaatcgactgaaaaaaatgtttcaaaggctgtaacatttgttgcatagaacgctattttatagggttttatacattatttttctcatcacaagaattatggagaagatattctcttgtcagtgggaaaatattacctttgcgtagtgatataagcttttaaaaagtagttataattaaaacgattaataaaaaaagtcagttaccgattgtaaccaactgaaaattgaacgatatgaaaacaatctccaacgaacaacttaccattcaagtatctccgcatggagcggaactttgcagcatcttcgccaatggaaaagaatatctgtggcaagcggatcctgctttttggaaacgtcactctcctgtcctattccctattgtcggaagcatatgggaaaatgaatatcgcaatgaagggattccttatacacttacccaacatggatttgcacgcgacatggaatttacgcttgtttccgaaaaagaaaatgaagtacattaccgccttatcagcaatgaagagactttgcaaaaatatccgtttccattctgtctggaaataggttatcgcattcaaggaaagcaaattgaggtgatatggaaagtaaagaataccggcgacaaagaaatgtattttcagattggggcacatcctgctttctactggccggagtttgatgagaacagtttagaaagagggttcttcggattcgacaggaaagatggcttgaagtatattcttatttctgaaaagggatgcgctgatccttctgttgagtattccttagagttggcagacggattgttaccattggatactcatacttttgataaagatgctttgatcttggaaaacggccaggttcgcaaagtcaccttatttaataaggagaaacgggcttatttaagtttacacttcaatgctccggtagtcggcctttggtcgccacctgcaaagaatgctccttttgtttgcatcgagccttggtatggacgttgcgaccgcgcacattatacaggggaatataaagataaagactggatacagcacctgcaaccggatgagatattccaagggggatatacaattgaaatcgaagaataatcgacaatagccaacaagacccggcaaataaaaagtagctgccggatttcacatctgacagctaccaacacctaattctaatctacaaaacctaacttataaatctaacctatgaacctttaagcaactaatacccattgctcttactgaatctatgaaaatatctattgtgtaaacctctaccttatattataaacctaatcgatacgcattgaatgaatcaacattgaacgttcctcctttactataaaaacacatacggttgtatggttccgatggaaaaaccagattcgtcattgctatttttcctccattcaggaatatttctacagaacacttatcaataaagatatccaaagcgtatttattttctttttttatcggcgcccaggtagctaatgcgaaatcatcgatataattgatcgaagtcgtctttctacggtcatgagcttctatttcatgagggacgctattctttccgaaatctacgataccacttttcgtccggtccattaccagtcttttttcaggaagattgaaatagatatctaccttttcacctttatcattaaaaagactgaagcccataatctccgctttgccggtagtaatctccaatgctaattcataagctccgttattatcagtcagtaaagaatcaatatgataatcattggatacggtgaaagaaggaatctccttgttttctttccgcaaagttttcgtctctgccaccggagccgccgaaagataaagctcaccgtcttgtgtataaagtcccaactcacgcggtaaagcattggcactacggaattgctttgtcggaacaatattgcaatattgccagttactcatccaaggtatggcaaccgtccgatcacttgtgttcgaaaaacagaccgtagcataatgatcctttccccaatccagccatttcgtgacatttggctgattgtcacaaataaatttcgttccgtcaaagtttcctgtaaagtactgggttgcactccctccgaaatagcatcccggattcacgtttactatcaacgcccatttcttacgatttatgtctccatctatcggaagttccaccatatccggacattcaaactgacaaggttgcactccgtacccttctccgaaactgctcatataattccagtctttcagattcttagagtcataaaaacgcatttccttatcggcagaaacaatcataacccacttatcttccggttcataccggaaaactttcggatcgcggaaatctttcaaaccgtcagaaggacaaaggatgggattcttctcgtatttagtaaatgtccgtccgttatctttgctaaaagcaagacattggatctgcccgtttttgtcactagcagaagtataaaaagccagaatactccccgctccatagccagccacattctccttatcaacaacagaactgccggaaaagatatgtcccaatgtatcacgggcaatagccggaggcaagtgttcccaatgcacaagatctctgctgacggaatgtccccaatgcatatttccccatttggaaccgtaagggttgtattgaaagtacaaatgatattctccatctttatagaccaacccgttggcatcattcatccaaccatacagaggagtatggtgataaactggacgaaacttatctgtattggctgtatcaaatgtatcagatagtttgatttctttccagcaaagtgcatcctttgatttattacgcacacgtacggtagcagtctttgctccggcaggtaaggcaagcggaacaaaatagtccacttttgtctgtgccagacgaatatccatatcggtatctgtagcctctcctgtatccagaagaacctgactttccattgcttcctcttctataggaagcaatatataattagccggataggtgatgtgaatgacagccaggctatcacctttctgttccaaagtcaacttgcttttagttgtatggcaataagtcagtccgtaagaaactgctaatgcaagtgccgcacctttacatagttttatccaaggggttgttttcatggcaacaaagtattcctgatttacacaagcttttaatcaaaatagatgaaggcaaagatagggggtatattcaccttcgtctataaactttgtttcaaagggtatcaattttgatacatcacttcatattctttcgttcattgcatgaataaagacggattgcctttttgttttcctgaatttatttttctacttttgaagcaaatctttattcttctacttatgccagcaaatagaaatgctctaatccgttataaaacgattgacaactgtctgcgtaatccgtatcgacgctggacattggaagacttggtagacgcctgttcagatgctctttatgaatatgaaggcattgataaagggataagcaaacggacggcacaaatggacatacagatgatgcgtagcgagaagttaggctataatgctccgattgtggtgtacgagaataaatactataaatatgaagatccggaatacagtatcacacaaaccccactgaacgaacaagacctgaaaatgatgtcggaagcagtggaagtgctgcgacaatttaaaggtttctcctatttcacggaaatgagcgagattatcaatcgcctggaagaccatgttgcttctgcccggatgaaaaccactcctgtcattgactttgaaaagaatgaatcgttgaaaggactggattatctggacaccatctatcatgcgattgtcaacgagcacccgatacaactcaaatatcgttcgttcaaagcacgttcggcaaacagctttattttctatccttatctattaaaagaatatcgcaaccgatggttcgtttatggggtcagaggaaacggacgaatattgcagaatttagctttggacagaatacaatcattggaagttctgccacaagaacactatatcaaaaatacattcttcgatccgaatacgttcttcgacgacctggtaggtgtcaccaaaaactccggaagcgtagcggagaaagttggcttcaaagtagcggcagccgaagcaccttacatcataaccaagcctatacatcgcagtcaacaactggtggaaaggctacctgacggaagcgtcatactggaaattgaagtcgtaatcaaccacgagttagaacgggtattcttcggatatgtcgacggaatagaaattctttatcctaaaacattggtagaattaatgagtcggaaattggaaaaggctgccaagcaatatactaagtcaaagtgaaaataaagctttcgcacattcgtacccttcctgataaaactctgtcagcttttgcacatctttttctatacggtctacagctacaggtttcaaaggacggataacgacaatcttcccttcatcttccatacgttccaccatttccagctgttcattataaacagcgcaccggcaacttaacgcttcacgcaacttcggatatttccggtatacaaacgaagggatacgaatgtctttcgaatctttccgatatccccggttacgggtaagtaccacgacatttctcttacagccatccgcaatagctctttgcagagggatggaatctacaattcctccatcgagcataggaacctcgtctacataagtgataggacacacaaaagggagactgctggatgcacgaacaatatcgatcaccctgctactgtcttttttctcttcgaaataattggcttctcccgtaatgcaattagtagtcaccatcacgaaacgttccggtgaagcaaaatatgtttcataatcataaggaagaatgtgttcgggaaattctttgaacaatagatcgaaatccaaaatattacgctttttgagcaaatgtttcagaccgatatagttgtacttctccaacaggtcaatattgctgtatttggcacgtccccgttgccgcgatgcatacgacaatccgttgcacgcaccggcagacactcctatcgtatagggaaaccggatatcatgatccataaagtaatcaagtacaccgcaggtaaatactccacgcattcccccgccttccaacactaatcccgtagattcgtcaattttcaagtccttcatttttatctcccgcattcttattccggcggatcaccagcagagatgacaattctcgtatcacagcctcatcctcggataatttcgtataagaaagatgactcattatcaatagtccgtctttctctttagtcactaaatcttcaactccttcaaaccatactataatcatttgtcccggataacgtgcctgcaaatcatcaatacatccgcgaaactcctcatcgtccgtatcaaagaggaaaagacgtatcgaatgcccgttctgcaacatcttctccagatacgaaaaaagaaatgcatcaatcattccaccaagtacgaaactaaccattgcgccttcccgatactgacgattgacaaatacagctaccggacacttcacctgctccataatatcatcaatcttatcccggaaaagcgttaaccacaaaatagcccccggagtccccggcatatccgtacggtaatggctcccggctcccaaaagcagcatatcaggatgttctttacggacaaaatgaatgatttcctgtacaagtttgtccgtcacccgataatggttatccacctgaatattcaatttcactgcctgttgattgagcaaagcaaaactctcgctggcataatgctcggcattcaacggattcaaatccgtgcctaccgtatagtgtgccgcaatcaaatgatttttcctcaactgcttcccaaataacaaactataaatggaaagcaatacacgcccggattccggacgtccgaaacaaaatatcaatttatgcttcaaagataacttttcttcgcgacgtacgaaaatatgttccaccaaatgaagcaaaggagtagtcataaaggtcgtaactaacgccataatgaccaaaattacgaatatagacgggggaagaactcccatttcataaccgatattcaaagcgacaagctccatcaatccccgtgtattcatcaatgtccctatcgtcaaactatccttccacgattcacccaccagacgggcagcgatggcacacccacccagtttgccggcaacagcaaccgtcaccaacagcagacataccatccacaactccggactgtttatcaaaccgatttccgtacgtaacccggtgaaagcaaagaataaaggtaaaaagaagactaaagatatatcttccactttttccatcatcaccttccggaaacccaaattggacggcatcaccacccctgccataaaagctccgaacagggcatgaataccgataatctccgtcagacaggaggaaataataagaatgagcagaataaatgctacaaatgttttattaataacttcccgattggcatatacctctcctaccttcttcaaaaacggacgaacgaccaaaaacatgactgcaatatacacaactgccagtccaactgaatatagtgcactggcaaaacttcccgctttggagatagcgataactactgccaacagacaccaggccgtcacatcgtcattggccgcggaagcaatagtcagcgtgcctaaaggagtcttagtcatattccgttcctgaatgatacgcgccaataccggaaaggcggtgatactcatagaaatacctataaacagagcaaatggaaggaatggagtctggtcggcggcatattcttcatacacccagtaagaagacaaaatacccagaaagaaaggaaccaaaattccggcatgactaatcaccagcgtttcattgatcttatttttcagcacactgaaatccagctccataccgatgacaaacatgaaaagtatcagtcccacctgactcaataattcaagattggtaagcgagtgagccggaaaaagaaaatgaaaagcatccggaaagaaaaagccgagcacggaaggtcccaacacgataccggcaacaatctcaccaatcactcccggttgcccgatcaggctaaataaatagccaaaaagacgcaccatcaccaatacagctataatctgaatcaataaggtagagagcggatgatgaatattgtcctgtataaactgaagaaataggctgaaagggtctccctgtgccacgttatgcgcatttatcgcatagtgcgaaaaccggtcaccctcttcaatagcgacataaatcaaccctccaaacaggagcaacatcaatacataaatgacataattcttccgggccctattccgcataaactctatttttacgatttgtgcatatttattataaaaacaaacgaaaaaggcagatagtttggcaaaaagaataaattctcaaacaaaatcttgtttttttgctttaatctatgtaactttaggctaacttaattgtttaaggaggaaaaaaattaaaaagtcctgcccgcaggcaagcaccatgagaatacagtttgagattaaagaaaatttgccggaaattatcgaagagatcttacactctgataagtggcaaacttccgtgaaggaagaacttagcggtcggacgaccgttgtgatccgtgaccaagcgtatggttcagaagctaccattgaaatttatgctacatctattgaaatcaaaactgcctggtctaagtactcctatcgtatatttgtagccaacgatatcgtatggtgcgaatataacggtgcctatcgtggtctgttggaacaagtgctcctacctactatcactcctaaagaaaacctgctcaattctgacgtaactgaaagttcgctttatggaaatgagcataagaaattgagggagtatgcagaagataatttgaaactgaaacaattccgccgggaaaacttcaatgagcagaagaatggaaccgcaccattcgatcatcccaagcgggtgtatgatgagtttatcaaagaagattatgtagttgcacccaaagaagaagagaagaaataatctgtacttaatgctttagtttgtgccatcgtattggcacaacagtgccaccatgttgacactatcgtgccaatgaggtggcatgactgtgccaacatggtggcattaatacactactcccaagttatccaggtcagcctttgatatggcaaattcatttccggctttaattcgttccagcactaaatttccgatacattgggcatcttgcaccgattgaaaaggccttttcccggatacaaccgggataaaaggctgaacgattatcaaacgctctctctcataaatcttataaccgtatccactaccttcaatctgggttacttccagccgatatatgtttatcgaatgcatatacccatatatgattcccactaaaagcagcaagacaaagcaactaatacctattatttttttatttctcttcatattcataaggcttcaactcccaagtatcatcgtaataataagtagaagctcctcccgtagctataattccccgttttccagtagaaaagcatacggctttcgagcgtgtacttccttcgaaatctgtcaaatcttccccatcccagaggtctgtcagagggtcgtaaatccaataattggaacgataactaccaccagcagtctgccccgcagcaatgtatcctttaccgtcgatcacgaaagcacaagcataagaacggacgatagaagtgtaatcgtcgtcataatcatcatcactcttatcgtaaagttcacgcaattctttccaagtacccgttgccggattaaaacaccagaaatccgtcacatccgaaccgttattttcaccgccgcagatataagctatatcatctatgacgaaggccataccgcccattctcttctgtccgccaaatccactcatggctgtccattctcctttatctcccaccgacgggtcgaacttccagaaatccttttgataattatcgttgtaacctgtacccagatacccatactgaccaatgccgaaagaaagcgcataataccgtttaccatagatattagtcccatcagttccatccggaatagaagccatctccttccaggaattcgtggcaggatcatactgccagcaatcattcagataatccttttttgtcgcatcgtaaccagtagcaatatatcctttggtacctactgcaaaacctgtagctgcattccgggctggagctgcatcgggcattgatgtacactgtgtccacgaattagcctcaatgtcatacgcccaacaatctttcaaacggtctttggtactcccccggtatccggtgcagaggtaccctacgttaccaatcgtaaaaccagctgcgtccgtacgcgccacaccatcaaaatcagaacggcgataccacacacctgccgtatattcagtatcatccgtacatgccgccaatgaaagcagcaccaccatcatgcaaagtaatttattcattttcgtattcataaatatgtcgttgattacaaccgcaaatgtaggcggcaacgggcacgcataaaaaaactatcgacaaatacagacattctatctaccaacaaaattcaggtcgacaaatacagagatttagtcgatagttttttggaggactatttaaaacctcttcttttgccgctacaaaaccaatttcatttttactacatgaagtcaatcatactacttttttcattctttatatctctttcttttttcgcttgtgtagacgattcatcgtccataggagcgaaatgggtacaaagttcatttctcaacgaacagatggacacttgtacggtattacttagtacagtattaagcgactccatagccacttcgggagatacggtttgccagataggataccgtgacgacaacttatgggggaaaattaccgcctctttttacgcagagtatgaagtaccttcctattcttttgatgaaaacatccaatatgagttcgactcgatcaccatacgcctgtattcttcgggcaattacctgggagatacactaaaaacccaacgcattcatctgcatgaactgacaaagaatatagaactggacgatagagggtacctatacaacactactactgcctattacaacgaaactccactggcatctttcgactttcgtcctactccgggctcaccgagcgaagaactggaaatacgattgccggatgcatggggagaagaatggttcaacttgatgctgaatgatggccgatgggtacaatctcaggatttcttccatgattatttcaagggaattgcttttatacccgatgcaaatgacgcttgtatcagcggatttcaagtcaacgactccagtatgtgcatcacggtctactatcaccagattacggaaacactgaacgaaaaaacactggttttcaatacaagcagcacactgacttacaacaaaatagaacaagaccgctcaaacatcccgatagccaacctgcaaagtggggacggcaatgaatactcttccggaaaaagcgagcatcaggtctacctgcagggaatgacaggtatgtatgtcaccatcgacttcccacatttaaataatctctgcgaaaaaggagagcttgtgactatcgagagcgcaacgttacagttatatccggtaaaaggaacttatgacggcatgtacccgttgcccaaaagcctggctctctacaccgccaacaatgaaaatgtgacgcaaagtgtaatcaccgacctcaccgggagttccgtacaaagcggaaatctagtagtcgacgagatgtcttatgaggagacttattactcttttgacatcacctctttcctgcaaacaaacctgggaactaccggatatgatcgtcagaaactacaattatttcttccggacaacttgttctataccacacttcaaggcgttattttcggcgacggagaacataccgccaataaaaagaataccaaacttatcatactttacaaaacttatcaacaatgaaaaagattttgttttgccttctggcattctatactcctgtctctatagttattgcacaaaatacaacgaactcccctacttccatgttcggactgggagaactttctaccggggaaggcgggcaatatgccggactgggcggcacaggcattgcattgcgaggaaataatttccttaacaatgccaatccggcttcactcacagagttgaccgaacaacgcttccagatcgatgccggtatcatgggagcataccagatttattcacaacgaggagcaagtaaccgttccgtcaccggaaatctgaataacctaagtatcggctgccggattatgccacgctggtatggagcaattttcatggctcccgtcagcagtgtgggatatgccatcacgctggatgaagaagtggcaggcaccaatggaggtactatctcttctctctttcagggtgaaggaggactttccaagatgggtatcagcacggcttaccttttcggaaaaagattttctgtcggcaccaatctttcttatgtgacggggaccatcacacaaacggagacgcaaggtactgccacagaagaaaccagctcctacaaacatactttttatgcggatttcggtgtacagtataaatgggctatagaccgcgaacgttctttcgttgccggtgccgtatatggttactcgcaggattttaagcaggataataacttatacgttagtagcagttcgggaggagatgatattgaaaaaagcctgaaacgctatcgccaatgtcttcctcaattctttgggctcggagcttcctacaacactctacgttggatggcaaccatcgactacaaatatgtggactggagccggatgcaatcttcccaatccaatgtcagttttgagaatcaacaccggttatcagtcggtggaagatatacattgggcaatgtctatcgtaatccggtcagcatcctattgggaacaggtattaataattcctatatcgtcattcaaaagaaaaaggcaaccgaatattacgtcagtaccggacttaacttcggattgcgcaataacaacgtcctttctatcggattgaaatataaaggccagatgaaaattcctaacggcatgcaaaaagaaaacagcctttccctgttcctgaatattactttctccgagcgaacttaccgcgccaagatacaataaaatgtcattaaacggaagtcattaagatagctgtccatttgaaaaaagagaaaactttgtgaaactctgtgttactctgtggtgaaactttcctatatttgtagccaaaacaatttaatattaatttcataggaatgaaaaagacaatccttattgctgctttaggcctgttcagcctaagtgttatggcacaagatgcaaaacctgaagaaggttttgttttcacgacagtgaaagaaaatccgataacttctatcaagaaccaaaatcgttcgagtacttgctggagtttctcaactctcggatttgttgaatcagaactacttcgtttaggtaaaggtgaatacgacctgtctgaaatgtttgttgtacacaaaacgatgcaggatcgcggagtaaactatgtacgttatcacggtgacagttctttctctccgggtggaagtttttatgatgtaatgtattgcatcaagaattatggtatcgttccgcaagaagtgatgccgggtattatgtatggtgatacgctgccggtacataatgagctggatgctgttgcttccggttatatcaatgcgattgcaaaaggtaaattaagcaaactgactccggtatggaaaaacggactaagtgccatttatgacacttacctaggagcatgtccggagaagttcacctacaaaggcaaagaatatactccgaagacttttgccgaatcactgggattgaactataacgactatgtatcactgacttcttatacacaccatccgttctattctcaattcgccatcgaaattcaggataactggcgtaatggtctgtcttacaacctgcctatcgaagaactgatggctgttatggacaatgctgtaaagaaaggctatacctttgcatggggtagcgatgtcagcgaacaaggattctcacgtgacggtatcgccgtaatgccagatgcagccaaagaatctgaactgtccggttcagacatggcccgttggacaggattgactgccgccgacaaacgcagagaactattcaccaaacctttccctgaaaaggatattacccaggaaatgcgtcaagttgcttttgacaactgggaaacaacagacgaccacggaatggtaatctacggcatcgctaaagaccagaacggaaaagaatacttcatggtgaaaaactcttggggtaaatcaggcaaatatgatggtatctggtatgcttccaaagcattcgttgcctacaagacaatgaatatcctggtgtataaagatgcacttcctaaagaaattgccaaaaaactgggaattaaataattatttaagaaaggcttaatttcccaatgtattccgtaaatttctccttataattatcaccgacaggaatataagtattcttatcaaagataatgcgaagacgggaaacttcggtaatcttgcgaagattgacaatataagaacggtggacccgcatgaaatgcgtgggaagccgttcttccattttctggaggctggcaagcgttattacaggcttgtcctctccttccacaaagatacgcacatactcactcatcccctcaatatagcggatattcttcacatcgatgcgaaccactctgtaatcgctcttcacgaataatgaatctccttttatctgcgaagcatttcctatttcaccctgttgttccaacaaacgatattcaaattgcctgcgggctttatccgccgctttcaataaatcctggaactcaaacggtttcagcagataatctacggcatccagtttgaaaccctctaccgcatattcagaataagcagtagtgaaaatcaccaacggacggttcaccaaagaacgtatgaaatccaatccgttcaaatcgggcatattaatatccacaaagatcaaatcaacctcctcttcggacaatatcttcattgcctcgaacgcatcctggcatgactttaccaaagacaaaaaaggtatctgggatatataatccgacaactgcgtcaatgctaacggctcatcatctattgctatacatttcattctaataaaggtataataagtaagacatcaaatttatgttcctcttcggtaatggaaagcgtataatcattgccaaataaaagcctcaaccgcttacggatattctcgagtccgatgccatgatgctgttcgtcagccgaaccattattgctgttggaacaacggaatgaaagccggttgccctcatccaactgtatcaagacatgaataaaagactcgctccgataactgactccatgcttaaaagcattttccacaaaagagacaaaaagcaaaggaggaatctgcacttcgggcacttcggccggaaaatccatctgaatagatactttgttggtatagcgcaaactcatcagggcaatgtaatttttaagaaactgaacctcacgtgaaagcaaaatcgttttattactcgcttcataaagcacataacgcatcagtttagagagttccacaatcgtacttttcgctttccccgtatcaatatccaccaacgcatgaatattattgagcgtattcatgaagaaatgaggattaatctgatatttcaaatactgcagttccgactgcaaacgttgatgttccagttccttcagcatttcttcatcacggaaagatttaaagaaaagtttgatggcgatattgaaccctaccatcaaaaaggcaatgatgaaatgaataagatagcggagcacaaaaggaggataaggaaaaggagtcggttttggaaatcttccgggaccatttggatctcccattcccctaggacgttgttcgggattggattcatgccaatgcacatccccttcctccctcgccttttctctcgtcttaataatctggtccctccggttctccttcatacggtgaggcaactctcctcgcttgaaatctttggggaaatgattggcagaaggaaacggagaaagccaacaaatcattcctattacaaaaatcaacgaaacagtatattgccagtaccttttcttaaaaagaaaatagggaaccagcccataattattcaacaggaaaagcacgaaaaaaggaaggatactcaaccatgattcgcggatcaccatacgggtttcctcccgttcaagtcctccactcatggcaaagtatccgcctatcagcggaagaagaaatattacgatccagatagctccgtaaatactctgctccagcacgtgttgtttacgcagtcttttcatgcctcattgcttctgattatcgaaacaaagataaaaccgaacctgttttatcacaaatagaatcgaccaaagaacggatttcgacggtaaactgctgtttaccatccccatccaccaggtccatgtccaccgcctccaccaccgggctggccaccgccggaagtgctgccgacttgtgtcaccatcgaactggcagtaaatgttgccgtctgtgtgccaccggaataagtggctcccgaatataacccgaagaactcggaaccaccggaaaccgttcctccttttgagatagtataactaccgcccgaggtcagattcggactactgaataataccgtcatttgagaataagcacggggaatctgataggtcagtacgctggttccgtcggccgactggatattcagtatttctccgttacttcccgaaccgccatagatcacagtgcgttgcgtacatacacttgatgtaggtgtacttgttcctcctccaatacccagaacaatccccccggtaatcttaaaggtattctgatcgcaatcgaatccgtcttcgggagaagtagtacccgacgatacgatcactccccccgtaatggtcaacgtaccattagagtcaatgccgtcatttccggaactataacaataaatattgccaccattaagaacaatgctgttacttgcattcatacagtcatcgtaacaaagcgcggcaactgtaccctcattgacagtcaacacacttttactctcgataccctcactaccttccccaccggtagccttcacaagcaccgttcctccattgattgtcaacgcaccgttcgctttgattccttttgccgacgagtcgagcttgccatacacacactgcgtaccggtagttatcactttcaccgtgccgtcattgatggtaatcgaaccgtcacagttgatacctttaccggctccacctgtactctgtatggcgatctcccctcctgtaatcaggatatttccgtcacatttaattcctgcacacgaactcaaatcattgtcttcataaagtgcggtttgagaagtgaatgcagtcagctttcctccggagatggtcaggttaccatcacaggatattcctttggaggctgctcccgccacttgtgcctgaatagcaccgccactgattaccacatccagacaagatttcaacccatgcgctttattgtccgttgtagagagtttggcaaatcctccggtcatcgtaattcctccctcttcacactgaatagcatcgccgtcagaagatatattcagtattccgccgccgataatcacagattcattagtatggattccgtcttttttggccgaagctaccgtaatattacacccgctacggaaacgcacataatcatcgcttgtgatggcatgtttataatttccggtaactgtgagtgaaccgcctccactgaaaatgagttgcccctcactgaacagacaggctttcatatcctctccatcagtagttgccgtataagaagacccatctgtcaacacattcgttgtttcatccgcgcataccacaaacacacgtttggaagactggatattaatggcagcacctaccggattgagtatagacacccctgccagtgataatttgaatttcttttcgctatataccttgaacgagccattcgtagtagtcccgctcaacacatattctactccgctgactgtagaattaaccacgacatgcgccccattggaagacacttccactcctgaaacaccattgcttaccgcagcagtcgttccattatagataatcgtcaccacagaggcgaattgggagttctctataaaatcatcatcggaagtaaccgtttccgacatgcttccatacgccgttttatcactttcatcaaaagcgattgtaaatcccaataaatcttccgatccctcgggaatcgtcgggttgggctgactgcttcctccacctcccgaacctccgaccaatattccttcctgatcgccgaaatcgaatgattccgtcgtacagttcaccaacaacagcaataaaagcggtatccaaaacaacacaatccttttcataatttcttgttttatctattaaaacttaaatgaatatcctgcagacgctttcagccaacgaaacatcttataggaaacacctgccgaacccgaccagcattccaccgtctgcaatccgtcccttgtacgaaattcaccttccagagaagcatcgaaaccggagaatatctttttcttcacttccagaaaagtcagaccggaagagacatatgtccttacacggatcttctcacggatcactcttccgttttgatgagccagatacatggcgtaatcgggagtgtcgagataggtagtgtgataagctatatttcgctccccctgcacctcttgcacacgataacaattactcgcccgttgtaatacgtccatcagggcagagagcgaaacgatatacttcgtgtccgtacggttcatcaaacggatggtactcatctcttccaaagaaatggaggagaaagcggaaagtgcggtggttacattacatgcctcgttcatattcataagggattagagtagcaagtgttacaatactgtaacaaatgtatgacagagaagcagaaaaaggaaaaaaaatcaatgaacgggggattcttatcggtgaatcgactgtattacagcaataaactgttctgttctattcttaagattctattattcaacagtggctatgaatcgaatcaaatagaaaataaaatgcataatctagtgcaagaatatgcatatcacgccccttattatgcataaataaagggtaaacagaccgtttttcattgtatgaaaacgtccgttctttaaatgcaaggtatccttggtcggtgaggaacgcctccttgctcaccgaccaagctaccgttcatcggtgaggaaggaggcgttgattgaaataagagtcgtttccaagctatgtcacttctaacttcgttaattttcaatataacaaatagctataacatcagaaaaaaaatattgatttatttcgaatctggtagcaaacaaatacaaacagcaaggatttactatcaaatcactgtcttttgggagaatccaaaaagacatttaagctcctatttatttgctatcctcatataggttctaattaaagcaaagaaaatgtataaaacatcctatttttatgtataaccctattttaagcaaacatagatttatttcttgtaatattccagcggattcctcttcacttttttacggaagtatttattgaaagttgtaaagatgaatattacattctaaactttccgcaagagtcagaaatagagaagaaaaaaaatgaacggtttctcacctgtgaaaaataggaggaaaaccatttgcttttttagagacctcttcattctctttttacagccattcttaaaagaagaacaatcgatattaaaaatagaacacatttattttttcattttaggtacttttaccgcatacgattaaaaatagaacattaaaataaaaaaacagaccttgacaataaagaattgttagtcgaactttgcaaagttttattaaatacgcaataaaaacaaaaagcaaaatgagaaacttacgaaaactatcttatgtcgcttgcgcagtatttttctttacatcatgcgaagaaacttacaatgacaagctattttggccaggagaaattagtcaggaatatggctcgtatattaaaccatatacgctagacctaacctacagcggagagaaattaattggaaaaactgtcagcttcaagacagaagatagcgaaacgggaacactgacgctgaataatataatcccgggagaaaaggaaactcctatcagtcgcatccaactttatgagaatgaaaagaaaggatattatactttcagcgggaccaatatcacaatgggaggagctacggtgaaatatgaaggaataataactccgaaaaacatgcaactatcactgaacgtaacaatggcttatgccaactccattgcaaacacatatacatttcctgcatactcccacacaacagatggagaaagtatcatccgtaatagcggagccagctacgtgaatattactacaaaagcaggaggagaatctctccagccggtgattttacaaatacagcaaatggcaactaatatattagatgtgatttttccttatgtattgaaggatattacatttgagaaaaatggaattgtcactgccagctatactacgagccctgtagacatgaatgaaattatggaagttgccaattcgggcaaaactgacgctgaattcaaaagtctgatcaacaaacgcacttatgagtcatctcccaaaggattggcctactggaatcaaacaggcaacaaagcatttgtcgtacaactaaatatccctgccattgtgtctctcatagcacaaaacaacggaaagcaaattgactatcagcttatcgcaggaatcagtgaagcacttctaaaatctgacccggcacgtttaaaattaacgttaagtgccatcaatatgattttaaacaatgaaataatcacctatattcttcaattggatgatgatacttttgcaactctgctcacatggatgaaagacggaataccaatgggcatcaactcaacaaaagaacatacttatatctatttcaacaaagaaactctcatgccgttcatcagcatcatcggtagtttgctggaaacaaatttaattgaagttgcagcccttttcgataaaatggaaatcggtattgacctcacagctaagaaataattcattttaattatctaatataaaaaaacaatgaaaaaaatatctatcctattaataagctgccttgccgtagcgtctgcatttttaacttcttgtgataatgatcactacggaccagagcctatagatgtaacagccaattattcaaataaactatcaaaccccaatccgaatctaattcttacctataatggtgaaacaatgatcggaaaatcagtagactttagcactgtaacaggagaaaccgctattattaacttatatgatattttaccaggagaaaaagaagtaaaaattatgtctatccccctttctggagatgggcaaggatattctttttcaggaaatagtatgggaaatgagactttaagctcttttagatacgaaggacgcgtaataaaaggacagttaacattaaatatatccaatatcaaaatgggcaatgcagaattatgggcaaatacttataaactacccacagttattaatggcatcaaaacgattgtagttggagacatgtggggagaagaatatacatggcaagatgttgacggacaagtactaaatgcatcatgctatttttatgcagacatagaagcttcagaaagtggagccacaactcaaacatggggtagtgccattcaaaacatattaagttatattttgccacaagttctacaagaaattactttaggagcggacgggaatgtaacggcttcttattcaaatgaaccattgacaggagtagacatggatatcatttttggatttctagaaaatccattaacacaggatatgattactcctaacattgttaaccgtaattatattccatctccaaaaggatttgctaattggttccaaaaagacggtaagttaatattaaaattaaacttagctaatattattgcctcaatatccagcggcaatcaatatatggatgtcaatataaccaatgctatcattgaagctatatcccaaatggatgctatgaaagtgaaagaattgctaaccacgctcaatcaaagtctaaaaaatgaaacacttggattcctgctcaatgtcaatgacacttctttcaaagctattttcaattggttaactaccggaatcccgatgcaagttatttcaaaagatggacatacttttatttacttagacaaagaaggttttactcccatagccaaattactaccagatcttagtccgctaatagtcagtctgcttccagaagatatgcaatcactgggaggaatcatctctatatttttgaacggtatatcagacgcttttctatcacctgaaaaaatagaatttggtttggaaattgttccaaataaataaaacaaaaaacaatgaagaaattatatatcctaacaatcctgttatgccttaccggtttcggaagcatctttgcccaaaccctgaaaggacatatatatgatgccaagaccaatgagccattggtcggagccaccgtcacctacaaacttcatggtaatcagggagtagtatctaacattaacggagaatatgaaatcaaacttcccgaaggtggagttgaccttgtattcagctatgttggctatgatgatgtcttgatgcccatcgttatcaacaagcgtgaagtagtcaccaaagacgtttacatgaaagaaagcaccaagctgctggaagaagtcgtagtcagtgccggacgctttgaacagaagttgagtgatgtcactgtctccatggacgttgttaaatccggagatattgcccgtcaggcacccacggatatttcttccactctccgcacacttcccggtgtagacattgtagacaaacaaccttctatgcgcggaggtagcggatggacttacggagtaggtgcacgcagccaaattcttgtggacggaatgagcacactgaatccgaaaacaggagaaatcaactggaacactgttcctttagagaacgtagaacaggtggaagtgattaaaggagcatcttccgtactatatggctcatcagctttgaatggtattatcaatatccgtaccgcacgtccgggactgacaccgaaaacacgattcagcgcctatatcggtgtatatggtgatgcggaaaacgacgaataccaatggagcgacaagagtttctggaaagatgataaatattctgttaaaccgatcctgcgcggaagtcttcttagcggtatacggaatcctatttacgaaggattcgacctctcccattcccgccgtatcggtaatttcgatgtcagcggaggaatcaatcttttcactgatgaaggataccgccaacagggatacaacaaacgtttccgtatgggagggagcctcacttatcatcagcccgatatgggaatgaaactgttgaactatggtttcaatgtcgatttcctttccaatcaatacggcgacttcttcatctggcgttcaccaacggaagtgtacaaaccgtctcctttcaccaacatgggacgtgaagagaataatttccatatcgatccgttcatcaactatgtgaatccggaaaacggtacgtcacataagattaaaggacgtttctattacagcgccgacaatatcgtacgccctacccaaggaacttccatcactgatattctgggaaatatgggaactgatgccaaaacgatacagaatatagccggtggcgattacagttcactttatcctgcattggtaggtataggttccggacttgtcaacggcaacctggaagatgccatgaacggagtgttcacctcattaggcaatattttcccgaatgcgacgactgccgattattgcgatctgatctcttgggtaatggacaacggagtgccgagtgacttagggggacttacgaacggacagttaccgagtgatctgattccgtggttatcaaatgttatcaatccgtcacgaaacactccaaaaacacagactgataagaacttcgattactacctcgactaccagttcaataagaaatgggaaggcggtgcacaaatcactaccggagtaaccctggaacatatccgctatgactccgctgtaatggatgaggtatacaaaagtgataatatagctgctttcttccaatacgatcagcgcttctgggatcgtttgagtgtatctgccggtgtacgtgccgaatattatcgggtgaataatcatcaccgtgaagccgaaactaaaatcttcggaaccaaagttccgttccgtcctgtcttccgtgcagggttaaattatcagttggctgattacagttttatccgtgccagcttcggacagggttaccgtaatccgtctatcaatgaaaaatacctgcgcaaggatattggtggagttggcgtttatcctaatctggacatcaaaccggagaaaggatttaatgcggaattaggaattaagcaaggatataaagttggtaatttccagggttttgtggatgttgcaggattctatacacaatataaagacatggttgaattccagttcgggctgttcaacaatgccaattacacgatgattaatagcataggcgatgcattccagatgctgacagatggcaaagggttcggtatcggagcccagttccacaatgtatcgaaagcccagatttacggagtagaaatctcaacgaacggcgtgtataatttcaataagaacacgaaattgttctataacttgggatatgtatacacggagccacgcgatgctgactatcaggaacgtaatgcagtagaggggctttataccgatcctcttcagatgaaagagaaatcgaacacaggtaagtaccttaaatatcgcccgaagcacagttttaaagctacggtagatttccagtggaaacgtatcaatgtcggtgccaatgtagcatggaagagcaaagttctggcagttgactatctgatgttggacgaacgcgagaaacagcagaaagacctgatggattatgtacgtggcatccttttcggttattcaaaaggagagacactggctacttactggaaaaaacataatacggactatgccactgttgacgtgcgcttcggagtaaaagccacaaaagaagtagctttccagtttatggtgaataacctgttgaataaagaatacagcaaccgcccaatggcagttgccgctccacgtactttcgtactgaaaatggacgtcactttctaactaactttcaagattcacaattacttaagaaacggctgctcaatgcagccgttttcttttttctcctcatttgtcatcatttatctatatattgcgtatctttaccccccgaaaacgagaagaaataaccgataaaatgaaaaaacaaatcctacttattgccatcctgttttgtacggcctttgcacaggcacaagaagtttttgtaactgctgattttgtaagcagttatatctggcgcggtatggatagcggcaatgcaagtgtacagccttcactcggcctcaactggaaaggactgaccgtttacgcatggggttctaccgaatttcgcgaaaagaacaatgaaatagatttatcactagagtacgaatacaaaaacctgactctttacgccaataactattttacccagacagaagaggaaccttttaaatacttcaattacagttcgcactctaccgggcacactttcgaggtaggagccggctatatgcttagcgaaaagttcccattgtcagtaagctggtacacgacctttgccggaaacgattaccgggaaaacgggaaacgtgcctggtccagttactgcgagttgagttacccgttcagcgtgaaggatgtaaatatgaatatcgaagctggtttcactccttgggaaagtatgtactccgacaaattcaatgtagtcaatatcggattatctgcaacaaaagatattaaaataacatccaacttctctttacccatcttcggaaagctaatagccaacccttatgaagagcaactttattttgtagttggaattacattgtagatgattcttacattcaattattaactaataaacacccccatgaaaaaacactttcttatcttcgcaacaggtctttttctactaagtgcctgtaattcggtaaaagcaccggaagctatcttacccattcccgaagccaaacaggtggaatggcaaaaaatggaaacgtatgcatttgtacacttcggacttaacacattcaacgaccgtgaatggggatatggagactccgatcctaaaacattcaaccctacccgtctggactgtgagcaatgggtacagacatttgtcaaatccggcatgaaaggagtgatcctgacagcgaaacatcacgatggattctgtctgtggcctacgcaactgacagagtactgtatccgcaacactccgtacaaagacggaaaaggagacattgtccgcgaactgtcggatgcctgcaaaaagtatggcattaaattcgcagtctatctctcgccctgggacaggcatcaggccaattatggttctcccgaatatgtagaatacttctataaacaactcaacgaactgctgagcaactacggtgacgtatttgaaatctggtttgatggtgccaacggtggagacggctggtatggcggagcaaaagacagccgtacaatcgaccgcaagacttattataactatccgcgagcttacaagatgattgatgagttacagccacaagctgttatcttctcggatggaggtccgggctgtcgttgggtaggcaacgaacacggatttgccggagctactaactggtcttttcttcgtgcaggagaagtttatccgggctatcccaagtatcgtgaactgcaatatggtcatgccgatggtaacctatgggtagctgccgagtgtgatgtttccatccgtccgggatggttttatcatccggaagaagacgaccgtgtgaaaacagtagacgaactgactgatttatattaccgcagcgtaggacataacgcaacgctattattaaacttcccggtagaccgtgacggattgattcaccctactgactctgccaatgccgtaaacttccaccagaatgtacaaaaacaactggcacacaatctgctggcgggactctctcccaaagcatcggacgaacgtggaagaacattctccgccaaagctgtgaccgacggtgattatgatacttattgggctaccaatgatgatgtcacttcagccactatcgaattcgatttacctcaggcagaaaagatcaaccgtatgatgttgcaggaatatattcctctcggacaacgtgtcaaatcattcgttgtagaatataaccaggcaggcgaatggctcccagtaaagctcaatgaggagactaccactatcggatataaacggctccttcgtttcgaaacaatcactacggataagattcgtgtccgcttcacggattcacgggcttgtctctgtattaataacattgaagcatattatgcaggagagacttcggatacatacacagcgaaagctgcagaactgaaaagttacccgttcactcttgttggagtagatgtagaggaagcacagaaaggcatggataaaaacgaccagaccacctgtttcatcaatggaaatacactattgattgacttgggagaagaacgcacgattacctcattccactatctccccgaccaaagtgaatataataaagggttgatcgcagcctacgaaatatctgtaggtacggacagtaatgcggtcaaccaggtagtagccaaagatgaattttccaatataaagagcaatccgattttgcaatcggtttactttactccggtcaaggctcgctacattcagttgaaagcaacacggatgatacatgacggtgaaccgatggggttagctgaaattgggatacaataatagatgatatggtacaaaaaacaggaattattgtgcagaagaaaaactatactctccgtacctggcaaaccgaagatgtagcatcattagcccaatatctcaataacaagaatatttgggataactgtcgtgacggtctcccctatccttatagtcaggaagatgctaacgtttttctctctatggtacaagcgaaagaaaacattcaagatttctgcattgaggtaaacggagaagcagttggaagtatcggttttgtacccgctacggatgtagaacgttttagtacagaagtaggctactggattggagaacctttctggaaccagggaatcgttactgacgccctgaaagaagccatcaactattatttcgaacacactgataaggtacgtgtattcgcagtcgtatttgagcataactccccatccatgcgggtattagagaaagtgggattcacgaaagtaggaattatgcaaaaggctattttcaagaatgataatttcacgaatgcacattattacgaacttatcaaataatccggaattcatcaacagtctgccggacaatccggcagactgcccataaacgctttgtcaaccctgaattaaatctataaaaaccctcctcttttgctcaaaaatcttaaacctgtgcattttttactcggatttcttgtcagaaccaagcgtttgagtaaatttgcacgctgatagttaaccggatagtttggatagcaagatattactacttgactactggctgctaacttgtagaaatactaatactaaaatttatagcatgagtttgaaaattgttgtattggcaaaacaagttcctgacacacgtaatgttgggaaagatgccatgaaagccgacgggacgattaaccgcgcggcacttcccgctatcttcaaccccgaagacctgaatgctctcgagcaagctcttcgactgaaagatgctcatccaggctctaccgtaaccatcctgaccatgggaccgggacgggcagccgacattattcgtgaaggacttttccgtggcgcagataacggttacttgctgaccgaccgtgctttcgctggtgcagatacactggctacgtcttacgcattggctactgccatccgcaaaatcggtgattgcgacgttatcattggtggtcgtcaggctatcgacggtgacacggcgcaagtaggtccgcaggtagcagagaagctaggattgacgcaaatcacatacgcagaagaaattctggaagtgggcgatggtaaaatcaaggtgaaacgtcatatcgacggtggtgtagaaactgtagagggtccgctgcctatcgtgattaccgtaaacggttctgccgctccttgccgtccgcgcaatgcgaaactggttcagaaatacaaacacgccaaaacagttaccgaaaaacaacaaggtaaccttgattataccgatttgtatgacaagcgtgattatttgaatctggtagaatggagtgtagccgacgtaaacggtgaccttgcacaatgcggtctgtccggttcgccgacaaaagtgaaagccatccagaacatcgtgttccaggctaaagagagcaaaaccatcagcggcagcgaccgtgacgtggaagacctgattgttgaactattagctaaccacaccatcggataatcatgaataacttatttgtatattgcgaaatagaagaaggtaacgttgcagacgttagcctcgaacttctgaccaaaggtcgttcgttagccaaccagttgaactgtcagctcgaagctgtagttgccggaagcggcctcaaagatattgaaaaacaaatccttccttacggagtagataaacttcacgttttcgacggtgaaggcctttacccttatacatcacttcctcacacagctatcctggtgaacctcttcaaagaagagcaaccgcaaatctgtttgatgggtgctaccgttatcggtcgtgacctcggtccgcgcgtttcttctgctctgaccagcggattgactgccgactgtacttcacttgaaatcggtgaccacgaagacaaaaaagaaggtaagacttataagaacctgttatatcaaatccgtccggcattcggtggtaacatcgttgctacgattgtgaacccggaacaccgcccgcagatggcaaccgttcgcgaaggtgtgatgaagaaagaaatcctctctccgacttatcagggagaagtaatccgtcacgacgtgaaaaagtatgtagccgacacggactatgtagtgaaagtcatcgaacgccatgtagaaaaggcaaagaacaacctgaaaggttctccgatcatcatagccggtggttacggtgtaggttcgaaagaaaacttcaacctattgttcgacctcgctaaagaacttcacgcagaagtaggtgccagccgtgctgctgttgacgctggtttcgcagaccatgatcgtcagatcggtcagactggtgttacggttcgtccaaaactctacatcgcttgcggtatctccggacagattcagcatatcgccggtatgcaggaaagtggtatcatcatctccattaacaacgatccggatgctccgatcaatacgattgccgattacgtaatcaacggaagtatcgaagaagttgtgccgaagatgattaagtattataaacaaaatagcaagtaaggaaagatggctaattattatacagacataccggaactcaagtttcacttgaacaatccgatgatgaaacgtatttgcgaactcaaagaacgcaattacagagataaagatgaattcgactacgctccgctggacttcgaagatgctgtagactcttacgacaaagtattggagattacaggagaaatcacaggagaaatcattgctgctaacgcagaaggtgtagacgaagaaggtcctcactgtgctaacggtcgcgtagaatatgcttccggaaccaaacagaacctagacgctatggtgaaagccggcctgaacggtatgaccatgccacgcagattcggcggtttgaacttcccgatcactccgtacaccatgtgtgcagaaatcgtggctgctgccgacgccggtttcggaaatatctggtctttgcaggactgtattgaaacactgtatgaattcggtaacgctgaccaacacagccgtttcattcctcgcgtatgccaaggtgaaacgatgtctatggacttgaccgaaccggatgcaggttccgacttacaggcagttatgctgaaagcaacttatagcgaaaaagacggttgctggttgctgaacggtgtaaaacgttttattacaaacggtgatgctaatcttcacttggtattggctcgttcggaagaaggtacaagagacggtcgtggtctttctatgttcatctatgacaagaatgagggtggtgtgaacgtacgtcgtatcgaaaacaaactcggtatccacggttctcctacttgcgaactggtgtacaagaatgcaaaagctgaactttgcggtgaccgcaaactcggtttgattaaatacgttatggctttaatgaacggtgcccgtctgggtattgctgcgcagtctgtaggattgagccaagctgcttacaatgagggattggcttatgctaaagaccgtaagcaattcggtaaagcaatcatcgaattcccggcagtatacgatatgctggctatcatgaaaggtaagttggatgccggacgtgctttgctgtatcaaacagctcgctacgtagacatttacaaagcattggatgatatttcccgcgaacgtaaactgactccggaagaacgtcaggaacagaaaaaatacgccaaactagcagacagctttactccgctggctaagggtatgaactctgaatatgctaaccagaacgcttatgactgtatccagattcacggtggttcaggattcatgatggaatatgcttgccaacgcatctatcgcgacgcacgtatcaccagcatctacgaaggaactacccagttgcagactgtagccgctatccgttacgtgactaatggttcttacatcgctactatccgcgagtttgaggccattccttgttcaccggaaatggaaccgctgatgtctcgcctgaagaagatggctgacaaatttgaagcaagtaccaacgctgtgaaagaagtacaggatcaggaattgcttgacttcaccgctcgcaaactggtggaaatggctgctgatattatcatgtgtcacttactgattcaagatgccagcaagtcttctgaactgttctccaaatctgcacacgtatatttgaactatgcagaagcggaagtagaaaagcatacaaatttcatcgaaaacttcgacaaagaagatttggctttctacaaaaagtaacaaataatcgactaaatctgataaaagcatcctttcttacgaaatggatgctttttttatttgtcatattctattattttccattattattctatacatttgtcagtgagataagtaattttttaattgatgaatgtagatagagatagaaatatggcactcaaaccttcatataatgacaaactgtatttgccaggtttatcaaacacggaaatccttatattggctctcgaagcctctcaaaaacttgagtggaatatcgaggaagtaactccggaaggaatccggtttgaagtcccgttcagtatacgctcccatggagaggcaataacctttaccatagaaaagggaagtgacggggaagtatccgttcgcagtcagtcttcttccgtacaatttgttgattatggaaagaacagaaaaaatatccagaagttacgggaaacaatggaagaaataaaagcctcactcactccggaagaactagcccaaagggccaaagatttcgaagaagagttcaaccgcccgctcacagaagaagaaaaagcctacatagaggaagaaaagaagaggaactctttcctgtctttcttcattccccgcaaaggatttatagcaactcccatcctgatagacatcaatattcttgtattcattgtaatgattgcttccggagtgggtattatgtctccttccactctgtcactactgaaatggggagccgacttcggaccgctgactctgaccggtgactggtggcgcacagtgacttgcaacttcatacatatcggagctttccatctcctgatgaacatgtatgctttcatgtatgtaggacttctgttggaagaactgataggaggacgccgtatgttcgtttcatacctgctaaccggattatgttcggctgcattcagcctgtatatgcacggtgagacaatcagcgccggagcttccggatctatcttcggactttacggtatattccttgcattcctcctctttcatcgcatcgccaaagaacaacgaaaggcattgttaaccagcatcctcatttttgtggggtataatctggtttacgggatgaaagccggcattgataatgccgcccatattggcgggttgttaagcgggtttgttctgggaattatatacgtggtcggctacaagttcgagaaacccgatgcacagcggactgtctccatcatcggggagcttggtatattctgtatattcctgttcagcttcatgatcctgtgcaaaaacgttcctcctctttacccggagatacgcaatgaatgggaaagcggcattgtggaagcctatctgaatggtgaactggaagaggaaaacgagaacagtaatcattccgctgtgaatgctacggacaatctttccagcaggaaagttccggcatatacgcctgtcggcaatgacgatacgtggctatcttattatgatgcagccaccaaattcagttgccagtatcctaccaactggataaaaatagcaggagcaaaaggaattattgacggtgcggaacctccattactcatgctggtcaacggagggaatcaattaacgattaccgccctcacctacgacacgcagaaggagtttgaacacatgaaagagttatcactcactctcccaagaaatgcacaaggggaaccgtcagaagattaccaactaagcaatgtcaacatcaacggactccccatgacaaagatcacgaatcccctgcacatcggggctcctgatgaaccgggagaggatgtaaaacaaatagcgttgcattactttcaagagagcaagaaacgatcttttgctattgtcatgcttgtctatgacgaagaagctgaaaccgatctgaatgccattacatcaagtatccagatcacccaataaagagaatatgagagtatatatccaaatcaaacagttaggaaagcgaaagtgcagtatcgaaaagattcctatcgattttcctgttccgcctgtcaatgtacaggggttgatcgaagccatcgtcagttggcaagtctgcgaatacaatgaacgcttgcaacagagcgaagtgctgaaatacctcacacaggaagaagtggaaaataaaacagcttccggcaaagtagggtttgcagtaaactataatggcaaacctgccgcagaagtcgaagccatcaccaatgctttgcaatcctatgaggacggaattttccgtatcttcatggatgatacggaaaccggagacctatcctctcccatccaacttaaagaagaatctaccttaaccttcatccggctcgctatgctgtcgggaagattatggtaatcattatcctataaaacacatttaaaacgaaaagaatcatgagactgatttacaatgacgcattaaataaacggattgctccgtacctggaaaggttaacgaaaaagagaaccagtttagacaaagagacaatggcactgttggatgtatttatgcaatacttcaacatggatacccggtatggtgcatacagcgataaattagagccttgcatcatctatattatccaagaagagaagattaaaagcgttgccaatcttttcgatggtaaattgaacaagctactccgctatctattgggagacgagtacgcccacctgttccacacctatctgaagctcaaagcacggtgcccgtacactcacggatactcgcgccggtcacaacggtcggcaaatcctcttctgcatatcggccacgttatagatgcactgacccagtttctgaaactgcgcgccaccggatttacggttcaagccatactgaacggaggaaacactccggaagaaatagaagcatacaaggattcgatgaactgccaaaactggatggccgcccaaatagcagaaggcaaccagactgtcattgaatacctcaacaatgtgctgaccagtgagaataacgccaaccgcctcaaccagggacatctccaggctatcgcagtaagtggataccgccccttgctggaactggaagggaagttacttctggcagccaagttacaggagggtctccgccaagctatcgtggaaacgatggacgaaggttgtcccgaaagttatctccatcttttctcggtcatctgcgacaacggcctgcaacgatttgcttccgtgaaacgcggtattgcagtcagtacgggtatcggagaacaagacagcagcgaacgtatcaccaataaatatgtagaactgatccatcgttttctgaacgaccggaaacaagcacacagtgctcttcaaagcaaagatacagtcgaactctatctggctttatggagcatcggattctataatacggaagagattcagacgctcgtaccggaaattatcaagaaaggtgctaaataccaggtacagacattactttatttcttacgccgtacgcaatactccggcatgaaccaccgcatcagtaaaaatgcctttgaaagatggtataaggaaccgtcggtggtggcggctatcttaccgttgtatctgtccggtctctatcttagccggtacggagggcacaaagacgccccgtcactccacgactattttgatagcaaagaagaggcggtccgccattatgaatatctgaagcaaatctatcagtccatctctgccaaagagatttattctccttatgtattcccttgggaaagcacagaactcacccgttcggaaatcgttctcaaaatggcatatatcacctggatgactaataattctgcattgaaagacgatctttgcagctatctgccctctctggatacttatatgcgggcaggctatatcggtgttgtattagctccaccgaccagtctgctacaggaagaatatgtactgcaatcactgggagaccgttcgcaagatgtgcgtgaagaagcatataaagcattgtccgagatgaccttatcgcccgaacaaaaccagaaagtagaagagttactgcgcttcaaatacagcgaaatgcgtatccatgctatcaatctgctgatgaaacagcccaaagaacagctagccgacagcatccgccgcttgctaacagacaaggttgccgaacgccgcctggcaggattggacatgatgaagaccatacacaatgtagaattcctgcaagatatctatcaggaattgatcccgacagttaaagagattcagaagccgaacccgaaagaaaaagtattgatagaatctctgattggcgatggaacagaagagagcgtcacacaacattataccaaagataacggtttcggtctgtacgatccgtctcttgaagtcagtctgccggaaattacccaggacaaaggattcaacgttaaaaaagcattcgaattcatctgttttggaagggccaaactcgttttcaaaaaactaagcaaatacatcgaaacctacaagaatgaagaattcaaaaatggttacggagaagcacgtctggtaggtaacagtgtcctgataaactggagcaactacggaggattgagcggactcggattcccggaattgtggaaagccttctacgaagaagaaataggaagctacgacaaattgctgatgatgagtttcatgcttgcatcgacaggtaccgctaaagacgaagacgactccgacgaggaagatgaagaagacatcaaggcagaccagaaatcaagtaatacttttgagccgcttgtcaaccggatgtatgccggcatcacttaccgcggattgcaaaaagacctccgcaagatgccgtactatgaacagatgagtgacatcatcgaagcactggcatacgaatacaaagatgaagccgtctatcaacgactggccgtcaatatgctgctccaactattgcctttgctaaataccaaaaacatcttccgccagtacaccagtaagcatgcatggcttcgggacaaactggaatacggagaaaaacaggtcgtttatccgatacataacaacaaattcgtgaacttctggctcgaaatgcctcaaaagcccatgaatgatgatctatttatccgttacttcacagtgcgctatcagctttataagctcaccaactacatggagcacacccccgaactagaggaaacagactcttatcttcatgccacagacttcgcccgtgcctggatgatgggaatcatcccgacagaggaagtataccgtgaaatgatgggacgcatcagctctcccagccagatcaaagcaatcactatggtattgaacgacaacgttcgtttcaacaaggaaaaagaaagatacgccgatatcaaaaacatcgacttctccctcttccgttccctcgtccaaaaggtggtagaccggattcttgaaattgaattaaaacgtggagactccgagacacaagtcacctcccttgcagaagaactaagctacgtctatggagctgaaacatttatccgtattctgcaagcattcggcaaagatactttcatacgtgacagttacaactggggcagcaccaaacggggtgtattgagcagtctgctccatgcttgtcatcccctgcctacggacaccagcgagaatctgaagaaactggcgaaacaagccgaaatcagcgacgagcgactggtagaagccgccatgttcgccccacaatggattgaactgactgaaaaggcaataggctggaaaggactgacaagtgcagcctattatttccacgcccacaccaatgaaacgtgtgacgacaagaagaaagcgattatcgcccgctacacccccatcgacgtagatgacctgcgggaaggtgcttttgacatcgactggttcaaagatgcatttaagacaattggcaagcaacgcttcgaagtggtctacaatgccgccaaatatatttcatgcagcaacagccatacccgtgcccgtaagtttgccgatgctaccaacggtgcagtgaaggcggcagatataaagaaagaaataatagccaagcgcaacaaagacttattgatgagctacggcctcatcccattgggacggaagccggataaagaactgctggatcgttatcaatacctgcaaaagttcctgaaagagagcaaggaattcggtgctcaaagacaggaaagcgaaaagaaagcggtaaacatcgctctgcaaaacctggcacgcaactccggttacggagacgttacccgcctgacctggagcatggaaaccgaactgattaaagaacttcttccctacctgtcccccaaagagatagacggcgtagaagtgtatgtacaaatcaacgaggaaggtaaatcggagattaagcaaatcaaagacggcaaagagctcaacagcatgcctgccaagctgaaaaagcatccgtatatagaagaactgaaagcagtacacaaaaagctgaaagaccagtacacccgttcgcgcatcatgctggaacaggcgatggaagactgcactcattttgaagaaaacgaattgcgcaagctgatgcagaatcctgttatctggccattactgaaacatctcgtcttcatctgcaacggacagacgggcttctacaccgatggattgctgattacagtaaatgccgtttgcctcccgttaaaaccgaaagacgagttacgcatcgcgcaccccacagacctgtatacaagcggagactggcatgcttatcaaaaattcctgttcgataaatcaatccgccaacctttcaaacaggtattccgcgaactttacgttccgactccggaagaaatagaagccactcaatcccgccgctatgccggcaaccagatccaaccgcagaaaacggttgccgtactgaaaggccgtcgctgggtagccgactatgaagacggtctccaaaagatctattacaaagagaacatcatcgccaccatctatgcgatggcagactggttctctcctgccgacatcgaagctccgacattagaatatgtctgcttccacaaccgcaaagactacaagttaatgaaaatctcggagattcctcctgtcatcttctccgaagtaatgagagacgtagacctggcagtaagcgtagcccatgccggaagcgttgacccggaaaccagccactctaccatcgagatgcgcagcgtactggtggaactgacgatgccgttgtttcatttcaagaacgtgacaataaaaggaagttttgctcacatcgaaggtaaactgggtaagtacaatattcatctgggcagcggtgtgatccatcaggaaggtggtgcacagatagccgttcttccggtacattcgcaaaatcgcggacgcctgttcctgcctttcgtagatgaagatccgaagactgccgagatactgactaagattatcttctttgcagaagacgataagataaaagatccgagcattctgaaccaaatcaaatagtaaagagatggcagaaaatttaatcatccacacaggaagcaaggaagaaaagtatcgggagttacttccgcaactgcatgctttggtaagtacggaagcagatctcattgccaatcttgccaacatggcagcagccttaaagcagactttcggtttcttctgggtaggcttttaccttgtgaaagaggaagaactcgtactgggtccgtttcaaggccccattgcctgcactcgcatccgctttggcagaggagtttgcggaaccgcttggaaagaagcccgtacactgattgttcctgatgtagagcagtttcccggacacatagcctgtagttcggactcgaaatcggaaatagtagtaccgatcctcaagcaggggaaagttgccggggtgctggatatcgacagtgatacattggatagcttcgacactatcgacgcacgctatctggaagagatttgcacgtatattgtattataaaataacggcataaacatcctgaaaaaacagaggctctgattgaatgaatcagagcctccgtttactataaatagagcctctgttcgaatcaaacagaggctctatttttttaccagtccatatcttctatttcccgttcccggtacagcaaaagttgtttgcgaagcgaacgcatttcgtgcctcatatcttccatcctttccagcaaatgatgaatggcatcgataccttccatgttgatggataagtcatagtacattctgctataacgttccacgttcgggagttccgacaaaagcagataatgttcaccgccttcggtatgcacgttaatcaaaccgccctcttccaacatttcgatgaatgaaggctcaatatgacatttgtgacagtattcactgacaattattaattcggtctgcatagtactcattcattttagttcatactctgtaattgacggaacaactctttctgtttgtcggtcaagttcgtaggaatcttgacagaataggtcacaatcaagtcaccgaattgtccttccttcttataaaccgggaatcctttacctttcagacggactttcgtaccgttctgcgtttccggttttatcttcagtttcactttaccgtccagcgtgtcgactactttctcgcctcccaatacggcagagtaaagatctacctccacatctatgtacagatcgtcgcccaggcgtttgaacaccgggtcttcggctataacgaacgtaatgtacaagtcgcccgcaggtcctccgttgacaccttcggctccgtagcctttcagtttaataacctgtccgtcggctacaccggcagggatagtgatacgtacctgtttaccatttacagtcaatatctgcttatgcgtttgagcagcatcacgaagggaaagatgaagttcggcattaaagtcctgtccgcggaatcccgcagaaccttgtcctcttcctccccgatgtccgaacattgattcgaagaaatcggaaaatccactagcgttgccaccggaaaatccttctccatcggaactataccaataggttccgttaccgtcggagaaaccctgacccgcaccgccgaatccgccgaaacctcctgcaccgccaaagcctccggcttgttgctgtgcacgtttctgcgcttcgaattcatcggcatgcttccaatgttctccgtactcatcatactttttacgtttctcggggtcactcagtacttcattggcttcgttgatttcctgaaatttatcctttgcactagggtcattaggattcaaatcagggtgatatttccgggccaacttacgaaaagcctttttgatatcatcctgagaagcacttttgtctactccaagaatcttgtaataatctatataggccatgttttatgaatttaatcgttcatacatcatacggcaaataacacgccaatcccatttttggatgcaaaaattaacaaggattaatacctaatacttaatacttgatattcctcttttccagcatctggaagtcttgcttcttcatgcccaaatcatccaacggacggggatcattgtgatcgttcagataaaccctcggtttcaggacgtagtacgaagccgtcacagcctgagaatcatcccggtaaggagtttctattccgcctaaagacagcatggtcgggaagaaagagctgctggaagaaacattcttatccttattttcaatagcggtattccaacgttcgggatacgtttcgcggtagtcatcggacatccaaatcaggaatggcacatgaagctgataataagaaggtacgggagaagcgtggaggaacagatgacgggaatcgtcgaaaatgtcctctccatgatcggaagtgtagagcatggcggcatctacctgctgtttttccaacatacggataagtcgtgacagaaaatcatccgtgtaacgaatagagttgtcataggcattcaccaggttatcccggtattttctctctgcttccatcggataatcgggcgtaaagaaagcatcttccgacgggtaacgttcgcgatagttaaagtgggaaccgtaggtgtgaagtacgatgaattgtttcgttgcacctttcgccagttcctcctccaccaatttcagaagttcgtcgtcagaaggattataggtagaactgaccgaatcttcttttataaaatcatacgtatcggcttccattccgaagaagtcgataaatgaatggttgtaacgttggttggagaaaaaagccgtccggaatcctgcctctttgaaagcggtgatgattcctttttgatggtagatagagtcgtagttgcaggcagtagcacccgacatcagcatggggacacttttatgtgtcgtattcgactctgtcaacacttttgggaaagcaatcagacccgtttgccgggataagagcgggttcgtttcacgttcgtaaccatacaattgccagtttagggcacgagaggtttctcctatgaccattacatatacttcccgttttccctccggatgagtaggccgggcatggaaagtaaagtctttggatgtacggtggtaatcctgtgtcagagctgttctttgaaaggcaagacctacgttgtagcatacgtttagcgggtataaatcagatttcaactcatatcccgaatcctgcacataggctccgacaagactaaggagggagattccaaagaccaggaaggctctcttccgttccctgcgaatgaactctaccgtaagtttccgtttacgtataattgaaatcgtccctaatatcagggcaggtacatagagtatgattacagcaataatggcaggtgtgagattatcgagcagttccaatgcctcactcgaattggtggtgaccagattcagaaacatatcgacagcgataatggactggccgaataaataaagcaacacgatctgaaaggctccgaagaacaggaacaggaataaaatccacagcatcttgccgcaattcctcgacaaagtcatcaacaggtaatagcaaccgaaaggtaacaacacattggcgacttttgccataaatggtaaaggttctgtaaaacagagtaccatattaggtactatcaagataaacaggaacagataaaacagatgttcctgattttccaaccaattctttatatttttaaaaagcttcattgatgttaaaaataaatccggtctggtgtttgccaaaccctaaatccaaacgtacatttactctcttcttaaattcccaacgatacccgaagccataattaggcagaatgtgtttcggggtgaactcggaaagtcgtggaaaaatcgttcccgctcctacccatacagctactccattccgtttccagacgtgttgccggagttctatttgcgcgtccattgctcccttgtcccgatagcgtccttcgtaatatccgcgcatggagtaagaacttcccaatgttgccatcaatccccaaggggtatcgccataggtaagcaatgtgtggaattgccctgccagcactccacctttccataccggctgataataactggtagtcagttctgtactgctaaacgcatatttattgccgagaaaagccggactgaaccgctggtctatccgcaaataatagccatgatatgcatttgtcaggaaatcacgtgaatcgtaaaggagggaaagtcccaggctggtattagtggttcgcgcggccattccttcccatagttccggtttctcaaagttccgtccgtcgatataatcgaatacggccatcgggccgatgtagaagttctttgccagccgaaacataaaatcgactttcacctgtgcctgaaaacgtttataatcgctttcgttatcagagttcgctccattgtcatatccccgtccccaatacagactgggaaaagaatagaaatagagattgtaattcaagcggtatttatcttttggaaacagatgatttccgcggactcccaacagatagaagccgacagtcgacacatctccgtaaagagagacattggagggaggaagaagcgtatcaatccgatcggttcgatatagtccggctgccaccagtccgagtccgaacttggtgtcactggaataatgtgggccgcctatcacactgaaatcaaactttttattctttttttccttattggcgtcattgaagtaatcaagaaactttttaaagaaactgcgctttgccggaatggaatcttccatggttgcagatatagaatcctccggcagttcaattttagtagaatgcagctgtgcgcccaacggggtttgtgtcaacaacaaaagcgcgaatatgattagcctgttctgtctagtattcataatcataagaagtagaaaactttgcggacaaagttagtttcaaacttcctataaaaacagatattcaggcgcttttgttgttccggatttcctttttaacgttttaaaagtcttataaactcgtctacatcttcttctgtcgtatcaaaagaagttaccagacggatttcattcctctcttcgttccagaaataaaagaaataagactccagcatgcggtcgataaccgggcggggcatggtgaggaataactggttactttcggctttttgagtgaaagttacttcgggcagtttcttcaattcagtgtaaagtttggcagccattgcattggcatggttggcattcttcagccagaggttatctgtgaggtatgccgtaaactggcaagagaggtaacgcatcttcgaagcgagctgggcggattgcttacggatgaagcgggcttccggttgcaggtctttattaaatacaatcacgcactctcccatcatcagtccgttcttcgttccgccaaaactaagaatatcgactccgcagtctactgtcagttcctttaaggaaagattcaaagcggcacaggcattggctattctggctccgtccatgtgtacatacataccattcagatgggcaaagtcagtcagacgttttaactcttcgggagtatagatggtgccaagttcggtacattgggaaatatagagagctctgggttgcgaatggtgctgatcgccgaaaccatgcagatagggttgcatcaattccggggtaagcttaccgtcgggagtagcaatcggacaaatctgacaacctgtcattttcacaggagagccgcattcatctacatagatatgagccgtttccgcacaaaagatggaatgatacggacgggtcatcagctgcaatgctaccacgttgctacctgttccgttaaatacaaacaaggggacacagttgggcgtaaaggtttcctttatcttcgctacggcttcttctgtccatttatcatcgccatatcctaaagaatggtctatattagcccggttcaatgcttccattaccaacggatgcacaccggaattattgtcggaggcaaaacttctcattgtttcttacattttaattcgtgatgcaaagtaacagaattatttccggaaatccattgaaaggaagaaacataaagcagaaaaaggataaaaaaacaagaatctccgaagtgctgactatgctgtcattcctctggagattcttctgttctcgttaaagcgtcaaactctttcagccaatataaacattcacacagagatatacataaagctcttcatcgcactgatcgaactctattttgctctctcttgacaaccaccccaaagcggcacccagctctttatctttcagcccggattttctcttcaaaagtccatagctccacttctcattattactaagcagttgccaaaccttaccggcattcacaccgatttcatttctgttcatttttctagagtaattaagaggtttaatacattaggttaagatttcgcctataaagataacaaaaggatattgcaattgtttatacatctttactaaaaagttgttacagaattaattttaacataaaagtggtgatgtgtcccgacacaaaggcgttattagcatatgttaaatcagaacttttctttgcagccatctgttattacataaaaatcaatcctaaaccaattacagctatggcaaaaaaaatagcagaacagttgatagatactctggtaaaatccggagttgaacgcatctacgccgtaacaggcgacagtctgaatgaagtaaacgaagcagtcagaaaaaacgatcaaataaaatggatacatgtgcgccacgaagaaacaggggcgtatgccgctgcggcagaagcacaactgaccggtcgcccgggatgctgcgcgggaagtagcgggccgggacatgttcatctgattaacggcttgtatgacgcacaccggtccggcgcaccggtaatcgccatcgcctctacaattcccaccggagagttcggtacggaatattttcaggagacgaataccatcaaactttttaacgattgcagttattataatgaagtagccactactcccacacaatttccacgtatgctccagtcggccatacaaacggctgtcacccgcaaaggggtgtccgttatcgggcttccgggtgacttggcaaaggcttctgccgttgctgtcgactcgtcggttatcaactatcctgccccaccggaagtttgtccgtcggaagaagatctggctcaattagctgacatgttaaacaaacatacacgtatcactcttttctgcggcatcggttgccggggagctcacgaggaagtgatcgcgctttccgagaagctgaatgctccggtggtatatactttcaaaggaaagatggaggtgcaatatgagaatccgtatgaagtgggtatgacgggattgttgggaatgccttcgggatattacagtatgcacgaagctgaagtgcttctcatgctcggcactgactttccatattctgctttcctgccggatgatatcaagatagcccagattgacataaagcccgaacgtctgggacgtcgcgcaaaggtggatatcggactttgtggagacgtcaaacttagcatccagtctttattgcgtatgctgaatccgaaaacggatgattctttcttactgaaacaactcaaaagatacgagggagtaaagaaggacttggccgcttacacagaagataaagggggcgtaaataagattcatcccgaatatgtgatgtctgaaatagacaaactaagttcggacgatgctgtgtttacggtagatacgggaatgacttgtgtatggggagcacgttatctgcaagcaacgggcaaacgccacatgctgggttctttcaatcatggttcgatggcaaatgcattgccgcaagctatcggtgccgcgttggcttatccggatcgtcaggtggttgcgctttgcggagatggcggattatcgatgactttaggagacttggaaaccgttgtacaatataagttgccgattaaaatcatcgtattcaacaaccgttcattgggaatggtgaagttggaaatggaagtagacggattgccggactggcaaacgaatatgttgaatcctgacttcgcccaagtggccgaagcaatgggaatgaccgggtttaatgtcagcgatccggaagaagtgttgactactttattgaatgcattcgagttggatggtccggtacttgttaatatcatgaccgatccgaacgcactagccatgcctcctaaaattgaattcgggcaaatggtgggctttgcgcagtcaatgtataagttgttaatcaacggccgttcacaagaagtgattgatacgatcaattctaactttaaacatatacgggaggtattttaagttattctatttttaatattttcattacctctctcaaagtatgacttgctattattgtctattgcaataaggtaagtcatacctttttatagtctatcttgaggtgataatcattttattttcttatgtttgtaatcatcaaaaagtaaaaacacatggaaaagaccgactcttcgcctttatcccgacaagcactgtacgctgataaaaaacaatggaatcaatttctttctgtttttttattggcagtgggcgttggttttacagtggcaggcattatcttcttttttgcctacaactgggatgaattacctaaatttgcaaagttaggaatagtagaggtgttattagtagcttctgtcctgctcgctacattcacccgttggaataagctcgtcaaacagattctcctgaccggagctacgttcttgataggtacgcttttcgccgtcttcggacaaatctaccaaacgggagccgatgcttacgatcttttcctgggatggactcttttcaccattctctgggcggttgctatccgtttcgctccgttgtggctgacgttcatcggattactttgtactacgatatggttgtacaatatacagatagccagtgccaactcttgggaaatgactttgttggccaatgcagtaacctggatatgtgccttggcaacgatcctcacggaaggaatgagcgcaaaaggtcatttgaacagaaacaatcgttggtttgtcagtcttctttcactggctactattatacacaccagttttctgttaatgatggcaatctgcgaagagaacgccatattgtctgttcccctcataagcaccgtccttctattctctgcaggactttggtatggatggaaagtaaaaagcctgttctatctggctatcattccgtttgccgcattaatgattctattgactacattcatatcacaaagcaatcttagggatgttcagatattcttctacggaggagttattgtcatcaccggaacaactttgctcatttacatcattcttcatctaaaaaagcaatggtatggcacagaagcataacctcactattcaagtcgtatccattatcggaggaatcctgacggctattttctttttgggatttctggcacttgccagaatcctccgctccgatatttcttgcttgattgccggaagtatattaattctcactacgctaacaatcagccgcatggtagtccggtcttttctggatgcaatgaacatcactttatacatagccggatgtgtattgattggcttcggtataaatgccagcattaatctcctcttcattacacttatgggaatcagtattctcacattcttattatcaagaggatttattctcccctttctttcaatcattctgtttaatatatctttcttcggagaagctgcccatgtcttttcttcgttttatcccttgcaaatagccgtagtccctatccttggagtatttctatttaccaacatctttgaaaacaagttgtttgagtgtataggaacagagaattacctttccaaatacaaaccatttcatttcggattattcgtatccggtatcgtctcactgggaggattatcaatcaattacctgatatcagaaacaaatagttggcttgtgtcctgcatactgtctgtttgtatatggttcggaattcttatcatggttcaacgaatcatgcaggtcatgaaagtggatcatccggtgaatcaggttggtatctacattctttgtattgttatctgtctgcccaccgtgtttgctccttatttatccggtagtttgttactgattttaatatgtttctattatggttacaaagcggagtgtgctgcctcgctccttctctttatctatgctgtttccaaatactattatgatttgaatttgagcttgctcaccaaatctataacgcttttcttcatcggaattgcatgtattacagcctggtatttcttcactcaaaaaagaacaagacatgaaaaagtataaccgaatattgattatcgcaaacctgatactgctattggggtatttcaactggtcggtttatcagaaagagcaaaccttgaaagacggacagttggttttgttacagctagcccccgtcgatccccgctctcttatgcaaggagactatatgagacttaactacaaggaagcctcatcaaatctgccagatgagcaaaccgacacacgcggttatgccatactccgaacggacagtaatcaggtaggagaaattgtacgattacaaaacacgttggaacctgtaaacgacaatgagctagtcatcagatataaaataataaatagacgcctcttcctcggcgccgaatctttcttctttgaagaaggacaggatactctttatcaaaaagccgtatatggcggactgaaagtagatgataaagggcaaagcttactcgtgggattgtatgatgaggactttcatcttattcaatccgataaataaagactaataagaaaacccggactttcgcaagcccgggttttctatattctcaaaacgtctccttaatctatagggaaataagggactagcaaattggtttctagtgcaaataaggagacattatgaaataaagaaaagggatacctgtgggaaataagggaggtatccctttctataagaagaacagaattggaaggattgactttcacaagccaaatccttcactctgtttcttctcggcgtattcttcacacaaggtgaagaagggtttgatttttattatttggagtagcttcaactgtaatacaatcctttgcttgtatgaagtattaggaagtttgaagcgactctccaatttgtcttcttattctgcaggaatggttacagtaattgtattctttccttcataattcttaattgtaccccacttagatgtagcttttacttctacagtataagttacagcttcgtagaaatggtgagatttaccttctgctgtaaaggtcacctttcctgtagaagcatcaagagacagataagttgacgcagctgcttctctaaatgcaaaagtaggagctaccagaccatagatattaagaggattagtaaccgaacttgcaaatccattgcttcctgttcctgctaccacagcaccatccttccacatagtcttgcctgctaaatcattccaagcaaagcctgttgaaacattatattctactgacttgtcagataaagaaagagtcgttgcagtcggagcaacccaagttccactaatatctttcacttcaacaataccttcaatcgtatcctctactttaccattatagctagctttaatagtaaacttaactacagcaggtacagttttaccgccaacagtcattttaccagtatagaggtctttgtcaaacgtaaacttagcttcgttttcatcatagttaacaccagcaatactattttctgtaatattagtagtgattacaaaagtcccccccttagccaaaacagcagtcttaacagcatcaaagttggagaatatagtagtaagcttaaattcggaagtaatagcagtagccgctgtctcagaatcttttgtcggagtaaagcctgtacgagtttgatctgaagaccacatttccgacactctagccaatttagccaaagtgataggcttaatcttaactggaacatttacaacaagcgtatagccatctccttcgaacttagctgttgcggtataatcaccagcagctgtatttttaggaatgattaaagtcaaggcattatttgcaccattttctaagcgtatacctgttgtaggaagaagttcaaccaaactcaaactttcataagctgatgggcggatattcacagccggatcgttataaatgtcagcaacatttagaactactctctcctctgcagcaactgctgtttcattagtccagtcacgttctaccaaagcatacgcatgtataagttcatcaatagtacgtgttacttttacagttcctaactttttaggattatcagaactagtttccaaatagaaacctggagccgttactttagccataacattagcagttttatccaaagaagcaatcagaccggatgtttttagactaacgctacctgcagtagaaacttcaaatagatttgcatctgttccagtcaagctataagtcgtcgcaaagatattctctacattcagttcttctaatgtttttgtaaatgctgtgcttccacttgcagttgttgtatatgaaaccgtcaaagttccaactcctgaataatcaaccggttggggagcatcatagataatctcgcctgctttctctgttactacctcataataagcagtcttcagataataactagactgtatcactgcgatataatcagaattaacatttgtcggagtcaatccttctttaccttccgcatcttttgtgcttacaatattcaaagatatcgcatggctcttttcgcttgaagttgttaatgatactgtaagaacaccagcttcacagttcttcacttctacggcaaacggttcagcagcacgagtccagttacgttcttcagcatttaacttgatttcgtagtttttattgaaatcctccaatgtcatagcagcagaagccggagaaatacggaattgcaattcttttgcatctgcactcttcgctgcaacaacataagaagatgaggttgaagttttcttagcatacaaagtatagaaatctacgctacgatctatgcttgtaggaatatatactacactctgaatcatacctttaatagcaacacccagttttgcaaggtcatcttctaacgtatctatacggctatttacagtcgtcagttctgctgaaacaatcgccttgactttttcactgaattctgcgcttgcataaagaccggaaagagtcgttttaagagatttcacctctgcaataacggcttctacactctcgaaaccattttctaccgctttatcttccaatgctgtttgatagtcttccagcgcagtcagtttagcaaggataccagttttatcagcattaatagcagcatacaattctttaataacatctgctacagttgcatcctctccggcaagagcagcaacttccttcatactgccaaagtctgcaagaacctttgtttgaatagcatcatttattgcagcggcaatctccccatcttctcccaaagctgtggcaatttcatcactgataagtcctgacagttttgcagattcaacgtagttcttcagctcttcttttgtagcgaaattgacttttaaaccatccaattcctctttaagggcttccagctttacaattcttgctgtcaaaccatcaatatcagacttttgaagtttcttcagtgcttctaaatcattcttagctgttgccaagtcttttgtcagctggtcgaccgttgccttatcagcagtctttgacaatttgtcctccaaatcagtaattttcagacccaaatctttaatttgagaatccttattctccaattttgtctttaaatcagccaactgactttccaaagcacttttagccacattaatggcagtttgcatgtctcccacgcttacaggattgtttgacttgatctggtcaatttgttcctgtacactttttatgtcatcatcatagtccttacaacctacataggtgacagtagaaagcgccaacgccccgaagaacatcacttttacaaattttcttttcataactacttaaaaattacattaataatatattattaaacactaagtttcaataatagcacaacccgttactctgtaggtaacagagaaacctttgtgcctgctcttctggagtagtcgatactgaaaaatgataccaaatgtgatgaaatttttttacccctgcttctgaaaggcagtagaggggaaggaaatcttttgcaaaatttagaagttaacaaagccctaatacaaagaatccgcgtgttttatttgtcctagttctacttttgaatgctttattagaaaaaatgtgtgatttcgtttggttgttttaagaaatatgctcatatttgcatcgatattcattcccgttacctacagagtaacagaataattttcaagcacttacacctgtcactgaacgctttacaaaatcgagaacttgcttatttgcttcatcaattttcttattcctgaaaggcttcagataagtttcagtgacggtgatagacgaatgtcccatcgcttcggaaataatacccggatggatttcacaataataagccgtcgtagcccaggtatgacgggcagtgtatgaactaagtttatctcccaatccgagcaattcacccaataacatcagctgttggttaaaactacgtaatgcaagctgatattcgcgataggcttctttagttccttcccgacttctcaacaatggaaataaataaggagaagaagaatcacgattcatgtatttctttaccaaagccattgcttccggagtcaatgtcaccgacaatggtcgcccggttttacgtctgcgatacgttattacattaccgcgcaaatcactcttacgcaaataagcaagatcgacaaacggcataccacgaagcgaaaacatcaggatgaatagctcctgcgcctgatataccgctaatggtacacccgatgcacgagataatttagcaaacaccttcttcatatcgtcatcacccaacgcacgtttatggtcagcccgcgttccggtataaacagaacgaaataaatgaggaacataaggagccttctgaagatcgaccgcacgattgtaaaccgcacgaaaggtccgtaaataggtggaaacggtgttccaactacatccacgactgcgaagatatacttcgaaccctttcaaccactccgaagtcacctcactaaaaacaaaatcatttttcccacgataagcaatgatggcattcagactactacgatagacatgtgcagtcccaaagtttccctccatctgtaacccagtggctacctgcttcataaatgctagtactttcaacatctcataatttattaataatttagacgataaatatacgagtattatcccatcaatggaaataccccgcatgaacaaacaaaggaaatagctaagatgttccaaagacaaaagagcacgaaaagcccggactttcacaagcccgggctttctatactctcaaaacatctccttaatctatagggaaataagagactagcaaattggttctagtgcaaataagaagatgtaatgagacaaaaaaaagggatacctgtgggaaataagggaggtatcccttccaagagacaaacatttgagaaaacatactttcacaagcataattttcagtctatctcttagcatatttctttttaaaggatttattatcctatattacaacttgtaaagagaaggcatcttaagtctaagaagaattaggatgccctcaattacaaatcctttaatcctgattacttatttacttttacgtagattgatacagatttagttctgccccacttatcaagaatattaacatttactttacaagtaggaggagttaggattacggcaccctccttcttagatataacaactttctttggatcatcagtaagattaccatcgttcttcgccaaataagttgtagcgtcatcatctgctaatacaactgaaacagactctattctgttatcgctgaattcataggaattaccacgagcatctattctcttgaaatctttagctgatatttctacagtatttccttcgattatgaacggatttgcttctgttcctataattttcttatctacttctttggtatattcgaaagtaccttcaaagatttctgatagtattgtcaaattgaatctatcagtaatagctttcaaacgagaatttccgaatggtgcataagacacagtaatataacgaccagtataagcaccaccccaattttcatcagttgctggcttagaaacataagggaaaactttaatttttgaattctttgttggttgtgggagagtctcatccaaccatgcaggagcaaactgctttttaccacttaccactctagaaggtttctcttcagtgaatgtaatagtattctgtttatccgctgatatagaaccttctttatatagggtgtaaagatcgaagccaatctttgtatcagcagtagcagcaagaactgcagtagtcggtactgtaccataagccttggcattatcaccatcaaagtaagcagttgcacgtttaaatgtgaacaatttatcattctgctgatctacagtaatcttgaatgtagtttcatacaaaaagtcattacccaaacctgcttgggaatccttatttttgaatttaactgtagcagtatgagatacggcagccacattttcttcgtcaaatgtagcttggattacaaatttagtaattttagctatatcagcttcacttgttcctgatacaggctttccgtctttatccagacctaccaattttaactgaatactaccatccatataagactgaaccacctttccattgatcattgccttatcatcagtataagcaatagtcgcaactattgggtctgacagtttaatttgtcctttaatctcatctactgaaggacctactatttcagaagtagctgtcttattgctagcatctacgacccaagtcatatctttgatttcagctttcttagacacataagtaaacgtcaattcaacttcaggatcttgagtacttccatcaacaagaagacagtgaatcttaactttcacctgaccctccttatttgctagaattgtattcttctctttatcaaattttgcatcagcttttttagcttcttcatcagttacctcataataataagctaccaccttatccaattcactaccaaacaattcatccaaattataggtagtttggtaaggcataggttcaggagcagtaaaattaacatccggtatattttggctgctagccttaattttcacaccatactgggaaatgatttcattaccccatgcatcttttgttgtaagcgcataagcagtttcagcactttccaaagctgtcaattcgtccttagtcaatccgtctacaaacttcagagtcaaatcgtatacacctttatttgctgtaggctctttttccggatccgctgcacgagtcaaagcatctatactaaaattatctgctatatttgcaacagcaaaattagtattacccttagagtccgtcaagcctatttcataagcttgaatatctgctgctttcaagtttacaggattaatcaatgcatgaatcttgctgccacctctagcaacaagcaaatcccctttcttcttgaaagttttgtttccattaaacacaatatctttgccagctatgctataatataaagtagtttcagcctctgtagaaccaacatcaacagaaccatcgccttttataccaagcacactcatactagtgatacgagccgatttcggcatagaaaccgtttcccattctttagtctccttattgaaaatattcaatatccaaaccaatggattactagcatcagcagctacataaatatcagtagcagctttaatttttgtctctacaggttttttagtttcagcatcccaaaccatccagaatccattttctgaaatttgaggtgcatatccgtcttctcctttaccacccggagatcctgcagcgcccggtttgccatcagcacctttctttccttctgcacaaataccaagatcattatcattgacaatccagttctttgttaccggatcaatcttaatagtcgttggtgtagcatccttaccgcttgtaatagaataacttttattatcattaaaagttatcttaaatccatcggtaatttgttcaacattggtaacccatttaccttctttcacaaaattctgcaactcggctatactagctttgtttgcgtcaatctgtgtttgcagattgtcgatgtcatcatcgtagtctttacagcctacataggtgacagtagaaagtgccagcgccccgaagaacatcacttttacaaattttcttttcataactacttaaaaattacattaataatatattattaaacactaagtttcaataatagactgcccgttactttgtaggtaacggagaaacctttgcgcctgctcttcgggagtagtcaatactgaaaaataatacgatatgcaatgaaacttttttacccctgcttctgaaaggcagtagagggaaggagatcttttgcaaaaatttagaagttaacaaagccctaatacaaagaatccgcgtgttttatttggttaattcctgttttgagtagtttattagaaaaaatgtatgatttcgtttggttgttttaagaaatatgctcatatttgcaccgatattcattcccgttacctacaaagtaacagagtaattttcaagcgcttacacctacaacagagcgtttcacgaagtcaagaacttgtttatttgcttcatcaattttcttacttcggaaaggtttcagataggtttcagtgacggtgatagacgaatgtcccatcgcttcggagataatgcccggatggatttcacaataataagctgtcgtagcccaggtatggcgggcggtgtacgagctcaacttatcggataatcccaataattcacctagcaacatcaactgttggttaaagctgcgcaatgccaactgatattcgcgatacgcctctttggttccttcacggcttttcaacaatggaaacaaataaggagaagaaggatcacgattcatatacttcttcaccaggatcatcgcttcgggagtcaatgtcactgacaatggccgtcctgtcttacgtctgcgatacgttattacgttatcacgcaaatcactcttacgcaaataagcgagatccacaaatggcataccacgaagcgaaaacatcagaataaataactcttgcgcctgatataccgctaatggcacaccggacgtacgagacaattttgcaaatacctttttcatatcttcatcgcccaatgcacgtttatggtcggcacgagtaccggtataaacagaacggaacagatgaggtacataagaagctttccgaagatcaacggcacgattgtaaaccgcacgaaacgtgcgcaaataagtggaaacggtgttccaactgcaaccacgactgcgaagatatacttcaaatccctttaaccactccggactcacttcatcaaaggtgaagtccactttcccactataagcaatgatggcattcagactgctacgatagacgtgcgcagtaccgaagtttccctccacctgtagcccgttagctacctgcttcataaatgttaatactttcaacatctcacttttattaataaatttgattctaaatatacgaagtattctcattactaagaatacgttgaccaaacaaaatataaagcaaggatgttttgaaaagatcaatttgcagaatagattgataataaaaagaacgagggtacccttttcggacaccctcgttttcatattcattcagcgaaagccggaattacatcattccgcccatgccccccattccgggagcgcccatcggcatttctggcttatcttccttcttttctacaattacacattcagtagtcaggaacataccagcgatagaagctgcattttccaaagctacacgagcaaccttagcaggatctactacaccggcagcgtgcaagttttcgtaaacgtccgtgcgggcattgtaaccgaaatcaccttttccttcacgtactttctgaacaactactgcaccttctttaccagcgttagcaacaatctcgcgaagcggttcttcgatggcgcgtttgatgataccaataccagttgtttcatcggcattatcacccttcattccttccaaagaatcaatagcacggatataagctacaccaccacccgggatgataccttcttcgatagcagcacgagttgcacgcaaagcatcgtccacacggtctttcttttctttcatttctacttcagaagcagcacctacatagagaacagctacaccacctgacaatttagccagacgttcctgcaatttctcacggtcatagtcagacttagttgctacaatttgtgctttgatctgttcgcaacgttccttgatgctatctttgttacctgcaccgtttacaacagttgtatagtctttagtaactgtaactttgtcagcagtacccaacatttcgatggtagcctgttccagtttcaaacctttttcttcgctgataacaacaccacctgtcaggatagcgatatcttccagcatttctttacgacggtcaccgaagcccggagctttcacagcacagatcttcaattgagaacgcagacggtttactaccaatgtagtcaacgcttcgctatctacatcttctgcaattaccaacagaggacgaccagtctgtacagcaggttcgaggataggcaagaaatctttcaggttagaaatcttcttgtcatagatcaggatgtaaggtttctccatctcacattccatcttttccgtatttgtcacgaagtaagcagacaaataaccacggtcgaactgcataccttctactacaccgatagtagtgtctgttccttttgcttcttcgatagtaatcacaccgtctttagaaactttacgcatagcgtcagcaatcaatttaccgattaccggatcattgtttgcagatacagtggcaacctgttcgatcttgtcatagttgtcacctacagtttcagcctgatccttgattgattctaccactttggcaacggccttgtcgataccacgtttgatatccatcgggctagcaccggcagttacgttcttcaaaccttcagctacgatagcttgtgcaagaacggttgcagtagttgtaccgtcaccggcatcgtcacctgtcttagaagcaacttcttttaccaactgtgcaccagtgttctggtaagcatctgccaattcgatttcttttgctactgtcacaccgtcttttgtgatgtgcggagcaccgaatttcttctcaatgataacgttacgtcctttcgggcccagagttacttttactgcatttgccaaagcatcgacaccttttttcaattggtcacgggcatcgatattgaataatatttcttttgccatctctttatttactatttaaagatttactatttactattattaattaacccaaaacagcgagaacatcgctctgacgcataatcagatatttagtaccttcaacgtcaagttctgttccggcatatttaccataaagaactgtatcgcctactttcaataccatttcttcgtctttcgtaccgtgacctattgccacaacttcacccttcaaaggtttttcttttgctgtatcagggataatgataccaccaattgttttttcttctgcaggtgcagggaggataagcactctgtctgctaatggtttaatgttcatagttacttgttatattttagttatacatttaatagtagatgttacccgccatttttcaggcggaacgctaaagttattgcgaaaagcgtgccaaagtaaataaatgattctttgtcagaaatagactgacaaaatgactgacaacttgcattgtatggcaaaaaagtatatttgtcacctactttttaaacaaaacaaaaggattattccttataatgacgtatattcgtaaacgaaccatcaaatgcactgtataaataatatgaatggaatagcatccggcctcatcatcgcctcttgcgtcttctactcctgcacttcgcgtacaggagagatttctcctgtacacgaacaacaaacagactcgctgtcacaggatacaatagttcaacccgaggttaaacctgttaataaaaaactcacggcagagcagatagaaatctccaaagatttattgtatgaccaatacacattggaagatacctatccttataaagacactacccggcagtttcagtgggataaaatcaaagaacggctggcattactcgaaaatatacagttgcagccttccacctgggccattctccagaattacaaaaacagaaatggagaagcaccacttgtgagaagtttcaaaagaaacgcttacggacgagtggcagatactcttggcatagaacgttaccaatccgttccgctttatctattgactgacacattagtacccgaacgttacggacaggatggggaattaacccgttttatcgaagatggagagaaattcataaaagcagagccaatgtttaccggagatgaatggatgattcctaaaaaatatgtcaaagtaatcggagatacgattgtttttaacaaagctgttttcgtagaccgccacaatcagaatatcgcttctcttgaacgtagcggaaaagggcaatgggtggttcgcagtatgaatccttccactacgggacgtcatctgcccccgtatgcacaggaaactcctttaggaatgtttgttttacaagaaaagaaagtgaaaatggtatttctaaaagacggctcgaaagaaacgggaggttatgctccttatgcgagtcgtttcacggacggggcctatattcacggagtaccggtcaatgctccccgcaagacgcagatagaatatagtccgtcgttgggaactactccacgctcacacatgtgcgtgcggaatgcaacttcccatgccaagtttatctatgactgggcccccgtaaatgaaactattatttttgtattggaataaccgttgaacaaatcagcatcgccattccctgattcttattatctatcttatgaaatatggttagaaaacatattctctataaggaggaaacttactttcttccttgggaaaagttgcttttcccttatcccaaactataactgcaagttccggttataaaactgcaactttcagttatgtaatcaaaagtttcagttatataatcagaacttgtggttatagtttatcttatactctaaacaagttttctccctatgcaaaagaagttggcataggatgaaaagaaacttacctatacgtacttgagagagaaaacaaagaggtccgaactcttcagtccagacctccaattataaaaagggatttctttatcccagatgatctcttatcaatcaaatatcttctttcttttattttctccggtttcactcaacccatactttgccctcgttatattctgaattatctctctctgtacactttccaatgcacttatttctttttgtaataactccaaggcagaacctttctgcaataaataagaccgttcagtatattttatataagaagtcggaatctcctgcttcttttctttataataggcaatcgcatatcgcaaagcttccgatctatatttgcagacagcctttcgttcggcatagtacaaatctttataagcattctcttcacttctcaactttttccagaatgcggaaaaggctgttgatacagcatctttctcttccttggttaccgcttccttttgcttcttcaccagatctttatattctttgtatgtatttaaaaacttatccagttcctctttactggctttatgttccagacgataagtctccaaagaagcaggacgctcatattcgacaacctgttgcagataaggcaaatcattccaacttatatatttattgtttgcttcacaataatctgcgtaagcagctgcaagctgccaactatattcttttgtcttttgactcaattcctcgttgatggcggacaagttcttttccatctctttcaagtcctgtgctaataccgcttgcatacttccccatccggagagaaacaaacaaagcatactccataaaactgttttcataataagatgatttaaattttctccaaagttattgtttctctacagaattccaaacacaattacagatttgcgatatatttccataatggagcagcattcagcgcttgcataatttcgttcttatcgagcagacttctcacctcttccaatgtgagcagatggacggtgatatcttcagtagcttccagatgctgatggtctatcagttccacgtctgtggcaagaaagcagtaagtcagattggtatgagtgctcggattagcggaaatcaccatatactcttgccagtttccttttccgtagcccgtttcttcccacaattcacgctgggcggacaccaacggcgaagcatcttccttctcgcagacaccggcacagagttcataacaagttcgttcgattcccggacggtactggcggacaaaaacgaattgaccatctttggtaatggcaatggtatttacccagtcgggatactcaaggatataatactcggggatatgattcccattgggaagtaacatatcttcgcaacgcacagtcagccatggacggcgaaatagatatttgctacttaccgttttccaggctttattcttctcttccataagatttgtttttctcccggcaaaaatacgaattcctccggattatcctacctttcggttgcttgtttttattcgtctgtgtcgatacaagtgatctctatctcatgtatctgctccaagtattttttggtagagcttaccaaagaacttcccatgtagaataaaaacatcaggctgataataaccatcaatgcaccaatcatggcaaaacgactgcgctgttcaaaaatactgctattcataactctgcctcctcttattttttgtccactacaaagataacacgcgagggctacaaaaaagttacaagaatgtttcaaaaaacttaaatattgaaattctgttcgtatctttgcaccaactaactaacaacctctttattacaatatggcatttacgaataatattatgattgtccggcataaactgctggcagaccttgttagactctggaaaaacgacgaattagtggaaaagatagaccggcttccgattgagttgagtccacgaaaatcgaaacccctaggacggtgttgcgtacataaagaacgcgcagtgtggagatacaagacttttcccctgatgggactggatatgacagacgaacacgacgaagttaccccactttccgaatatgcacgattggcattgagtcgtcccgaaccagacaaggaaaatatcatgtgcgtcatcgacgaggcctgttcttcctgtgtacagatcaattatgaaataaccaacctttgtcgcggatgcgtggcacgtagttgttacatgaactgccctaaagatgcgatacgtttcaagaaaaacggtcaggcaatgattgaccatgacacatgtgtcagttgcggtatttgtcacaagagttgtccttatcacgctattgtatatattcccgtaccttgtgaagagtcttgtccggtaaaagctatcagcaaagatgaacacggcatagagcacattgatgaaagcaagtgtatctactgtggaaaatgcatgaatgcttgtccgttcggggctatcttcgaaatctcgcaaacgttcgatgtattgcaacgcatccgtaaaggggaaaagatggtagccatcatcgccccgtctattttgggacagtttaagacttctatcggacaagtgtacggtgctttcaaggaaattggatttactgatgtgatcgaagtggccgaaggtgctatggcaaccaccagtaatgaagcacacgagttactggagaaactggaagagggacagaagtttatgactacttcctgttgctcttcttatatcgaactggtagagaaacatattccggatatgaaaccttatgtttctaccaccggatcaccgatgtactacgctgcacggattgccaaagagaagcatccggatgctaaggttgtatttgtcggtccttgtgtagctaaacgaaaagaagtacgtcgtgacgaagcggtggattatattctgacgttcgaagaaatcggttcaattctcgatggactgggtattgaactggaacaggtacaggagttctctgtattacatacgtctgttcgcgaagcacatggatttgcacaggcaggtggtgtgatgggagccgtcaaagcttatctgaaagaggaagcggagaaaattaatgcgatacaagtgtcggacatcaataaaaaaaatatcgctctgctgcgtgcctgcgccaagacaggaaaggctgcgggacagtttattgaagtgatggcatgcgaaggaggatgtatcaccggaccgagtacgcataacgacattgtttcgggacgtcgccaactggcacaagagctgctcaaacggaaagagagctatgaaacaatggatcgataaactacgacaggaaagaacactgacaccggaagagttccggcaactgttgaccggatgtgacgcagaaattctgcgttacatcaataaacaggcgcaggaagtcgcactcctccacttcggaaataagatttatatccgcggactgattgaaatcagtaactgctgccggaacaactgttattactgtggtatccgaaaagggaatccgaatatcgaacgttaccggttaagccgagagagtatactgaactgttgcaaacagggctatgaactgggattccgcacctttgtattacaaggaggagaagatcctgcactaacaaacgatcagatagaaatgactgttgcccgtatcagacaggagtatccggattgtgctattacgctgtcactcggtgaaaaatcacgtgaggcatacgaacgtttcttccgtgccggagccaaccgttatctgttacgtcacgaaacttataatgagttgcattaccggcaactgcatccagcggaaatgtccggcaaacgacgcctgcaatgtttagcggatttgaaagagatcggttatcagacaggaaccggaattatggtcggcagtccgggacaaacagtagagcatatcattgaggatctattgtttatagaaaagctacgcccggaaatgattggcatcgggcctttcctgccccatcatgatacaccttttgccgaatatcccagcggaacggcggaacagacgattcttctattatccattttccgcctgatgcatccgtccgcattgattccggcaacaacagcccttgccactctcattcctgatggcagggaacggggtattttagcaggtgcgaatgtggttatgcctaacttgtctcctcgagaggaacggagaaaatatgaattatataatgacaaagcttcactcggagcggaatctgccgaagggctggctgccttacaaaagcaattgaagaccatcggctacgagatttctaccgaaagaggcgactttaagtacactacagagaatatatgatataccaaaaagattcatcaaaagcagaagagtttatccatcatgaggagattctggatacgctggaatatgcgcagaacaataaggataaccgtgtcctgattgaacaactgattgaaaaagcggctttgtgcaagggactgacgcaccgggaagcggctattctgctggaatgtaaccaacctgacctgatagaacgtatctttcatctcgccaaagaaatcaaacagaagttttatggcaaccgtatcgtcatgttcgcaccgctttatttgtcgaactattgcgtaaatggttgcgtatattgtccgtatcatgctaaaaacaagacgattgtacgcaagaaactgacgcaggaggaaattcgcagggaagtgattgctttgcaggacatgggacataagcggctcgctcttgaagcgggtgagcatccgtcactaaatccgatagaatacattcttgaatctattcagacgatttacagtatcaaacataaaaatggagcaatccgccgggtaaacgtaaatatcgcagctactacagtagaaaattatcgccaattaaaagaagcgggtatcggtacgtatatcttattccaggagacttatcacaagaacaactacgaagcacttcatcccaccggtccgaaaagcaattatgcctatcacaccgaagcaatggaccgtgccatggaagggggaatcgatgatgtaggtattggtgtgcttttcggtttgaatacttatcggtatgattttatcggattgttaatgcatgccgaacatctggaagccaaatttggcgtaggtcctcatacaatcagtgtgccgcgtatctgttcggcggatgacattaatgccggagattttccgaattcaatttccgatgagatattcagtaagattgtagctgttatccgaattgccgttccttatactggaatgattatttccacacgtgaatcacaagaatcacgcaagaaggtactcgaattgggtatctcacaaatcagcggcggctcacgtaccagtgtaggcggatatgctgaaacggaattacccgatcataattccgcgcaatttgacgtaagcgatacccggacattagacgaagtggtcaactggttgctcgaactcggatatatccccagcttctgtactgcctgttaccgggaaggacggacaggcgaccgtttcatgtcattagtgaaatccggtcagatagccaactgttgcggaccgaatgccctgatgactctgaaagagtatctggaagattatgcttccgaagatacccgccagaaaggattagaattgattctaaaagaaacagaccgaatccctaaccctaaaatcagggaaatagctatccgaaacctcaaagccatagccgcagggcaaagagattttagattttaaatcatacgccaatgtgctaatatgtcgatgtgccaattggctgcgcatgaattaacaaattgataaattagtaattatgagcttaacagatactccaagtgcaagcagacttcatatagcctttttcggtagacgaaacagtggtaagtcttctctcatcaatgcattgacaggacaagataccgccctcgtttcagatactccgggaacaactaccgaccttgtatccaaagctatggaaattcaaggtattggtccgtgtttgtttatagatactccggggttcgatgatgagggagaacttggagagctgcgtatcagccggactttaaaggctattgagaaaacagatattgcattgctgctatgtggagatactttttctcatgaaaaagagatgctggcactattgaaagagaagaatatccctgtcattccggtactgaataaaatagatatacgagagaacagtgatagcttggccacgtatattgaggaagaatgtaaaatacgcccattacttatcagcgccaaagaaaagacaggaattgaacagatccggcaagccattctcgaaaagctaccctcggacttcggtcaacagagtatcaccggggaacttgtgacagaaaacgaccttgtacttctggttatgccgcaggatattcaagctccaaaaggcagactgattttaccacaagtgcagactatccgtgaattgttggacaaaaaatgtctcgtagtgacttgcaccactgacaagtttccggcaaccctgcaagcccttgcccgtcctccgaagttaatcatcaccgattcacaagttttcaaagcgatctatgaacagaaaccaaaggaaagtgaactgacttctttttctgtacttttcgcaggttataagggggatattcactattatgtagaaagtgcaactgcgattgaaaggctgacggaatcgtcacgtgtactgatagcggaggcttgtacgcacgctcccctttccgaagatataggaagagtgaaactcccccgtttgttacggaaacgaattggagagaatctgcaaattgatatggtagccggaactgactttccacaagatctgactccttattcgctggtaatccattgcggagcatgtatgttcaatcgtaaatacgtacttagccgcatcgaacgtgcacgggagcaacacattcctatgacgaattatggagtagcgattgctttcctcaatggaatactagatcaaataaagtattaaatcccggtcaaaaagaaagagtccggtgcaataccgaactctcgcaatatacagtaaattattaactgctcaacttttgggatgcagttaataattttataatttcaattcatcgctgcttatttcttcacagtagcaatcagctcctctgctgaaacaagattctgttctcctgtctccatattcttcagcattgctttgccttcgttcatttcattctcaccgacaatagctacaaacggaatattctttgtattggcatagctcatctgtttcttcatcttggctgcatccgggaaaatctcggcacggataccggcagcacgcactttcgacagaattcccatagagaatgcagcttccttttcgccgaagttgatgaatagaagttctgttccatttacagcttctttcggataaagttcaagttggttcaatacgtcgaagatacggtctgcaccaaaagagatacccactccggacactcctgccataccgaatactccggtcaggttatcataacggccaccaccagtgatactgccaatctgtacatccagtgctttcacttcaaagatagctcctgtataatagttcagtccgcgagctaaagtaagatcaagctctatttcattcttcaagcccattgtttccaatgtattcagaataaattcactctcttccactcccttcagccctacttcactggctgataacacattcttcagtgttgccaatttctccgcattcgtaccactaagaagaatgatcggctgcaacttggcaatagcctcatcactgattcccttctctttcagttcggcatttacattatccagaccgattttatccagtttgtcaattgctacggtaatatctacaatcttatccgattcgcctataatttcagcaataccggaaagaatcttgcggttgttaatcttaatacatacacgaatattgaaacgactaaaaacggtatcgacaatctgcatcaattccacttcgttcaataacgaatcgcttcctacaacatcggcatcacattgataaaattcgcgataacgtcctttctgcgggcggtcggcacgccataccggttgaatctgatagcgtttgaacgggaaagtgatctcatcacgatgcatcactacataacgggcaaaaggcactgtcaagtcgtaacgcaaacctttctcacagaatttgcttgccagtttggcagcattacggcttaacaattcttcgtcagtaatcccggaaaagtaatctccagagttctgaatcttaaagagtagtttatctccctcatcgccgtactttcccatcaatgtagaaagcatctccatcgaaggagtctctatctgctggaatccatacaaatgatatacgtcacgaatcgtattgaatatataattacgcttcgccatttctaccggcgaaaagtcacgagttcctttaggaatacttggttttgctgccataatattactgtttataattttaattgcgcaaatttactgcaaatttccgagcaatacttacatatatttgaaaaaatcacccgtattgtgtccatcccctatcaatatcgtaaagaaacactcaagtaagaccctaaacaatacaaaaaatcctccatagtcttcggaaagactgcggagaatctttttatattctatggagagaagttaataaacgtacttttctccctttttcatttcttagtctcttctacccatgaagatcatgatgtagtataccaatgtagccagtgagcctaatgcagcaactacatacgtataagcagcagaacgaagagcatcttcagcctgtgcatgattgtacgaattagtaatgccggatgaactcaaccagaccaacgcacgtttacttgcattgatttccaccggcagcgtgataaagctgaacaatgtagtcatagcaaacaggataatacctgccagcaataactgcgggaaagagtttatcaacaagataccacccaacaatacccacgtcataatggaagaggcaaagtttaccaccggaaccagcgcactacgcattttcaacggagcatacatgcgtgcatgttgtacagcgtgtccacattcatgggctgctacggcagctgccattatactgttactttcatacaccccttcactcaaattcaccgttttgttagtaggattgtagtggtcggtcaaccgtcccggcgtatgtgtaacctgtacgtcataaattccattgtcatgcaacatttttaaagcaacgtcgcgtcctgtcattccatttcctgtaggaatcttagagtacttcttgaatttgttttgcaaattcatctgtaccaaccaacttacaacagcgattcctataaataatacccaataagacatcatatacttttcaattttaattattactctatatctttataaacaaattgtttgccaaaaataaggggaaacgttcaatgtcagaatagtttccccttgcttttatgaagaattagctaaaaattagtcaattgtcagttctaccacatagtcaatatctttcggaacctcggcgaattcgagcaaaacaccggctttcgtctttgtgaaacgaaccggagactggtctttaaacaagactgccttcttgaccttcttatctgacaacggcaggaacaaagccgcatctttcaggtcgagaatatgcacatagagtttatttcctttttgtgttgtcactccccaatcatgtggagcaactgcaccgcttcgtgttccataaatcgtttcaccatattgtttcatccactctcccatctctgccaagcgttgtacagctaccgcaggaagttccccatcgggttgagggccgatattcatcaaaagattggcattcttaccggctgccttcaccagatagtgaatcaatgtctttgttgatttataattctgatcggtaatcttatatccccacataccattcattgtttcacaagtttccaacggcagacgactcacctcctgtccggaaagtcccgaagcattctcacccggcagatcgcgttcgaaaatctgaatatcttctccatcaaaaggcgtctgatgatgattattacccaccagacaccccggttggagtttgtgaatcagagcatactgttccggtaattcccagttaaaagttttgggctgatcccaccatccgtcaaaccaaatagcacctatcggaccgtaattcgtcagcaattctgtcaactggttattcataaattgataataacttttccaatctcctttcgagttcaagcgacctgtgccctgtcctgtacgtccccagggatagtcctcgcgcgcccagtcaagatgtgaataataaaaatggagcttgatgccctgcttggcacaggctgctgccagctctttcacaatatctcttttaaaaggagtagctttgactacgttataatccgaatacttagtgtcaaacatagaaaaaccttcatgatgacgggtagtaaaacagatatatttggctcccgaagctttaatagcctccacccatttatccgcgtcaaacttggaaggataaaatccgcctgccagtttggcatactctttataattcagattattgtttgtcatagtccactcaccggtagcgagcatagcgtatagcccccaatgaagaaaaataccaaacttattatcctgaaattcctgccgtgctttcagattctcttcggtaggctgataggaggattgcgcaaatactcccaagttcattacgaacaacaaaaggaaagttataaaacgtgttttcataaggcatacattatttttgtgtgtttaggatagactatacaaaggattgaacaagaaaggcggagtttttcttcaatctccgcctttcctccatataataaatcaattgttattcttcagtataacgctcgatggtctgtgctctgtctggtcctacagatacaatcttgatttctacaccaagctgttcttccaggaaagtcaggtaagcattgaattcttccgggaattcatcttcgctctgcatcttggtcatatctgtctgccagcccggaagctctgcatatacaggttctacgccttctgtgatgtcatacgggaagtagtcgatctcttcaccgttcactttgtaagcaacacacgctttgattgtttcgaaagtatcgagtacatcgctcttcatcataatcaatttggtaactccgtttatcataacggaatacttcaacgctaccaggtcgatccatccgcaacgacgtttacgaccggttacagaaccgaattcatgtcccaacgtacacatcttgtcgcctgtttcgtcaaacagttctgatgggaacggacctgctcctacacgagtacagtatgccttgaagataccatatacttcaccgatacggttaggtgccactccaagtccggtgcaggctcccgcacatacggtattggaagaagtcacaaacggatatgaaccgaaatcaatatcaagcatagtaccctgcgctccttcacaaagcacgctcttaccatccttcaacaggttattcacttcatgttcgctatctacgaaatggaattgtttcaggtattcgataccttccaaccatgctttttccagttcagtaagatcgtattcataattcaagctcttcagaatttgttcgtgacgagcttttgcggcagcatacttctgatcgaaattatgaagaatatcacctacacgaacaccgttacggctcactttatccgtgtaagtagggccgatacccttaccagtagttcctactttagcatcacctttggctgcttcgtatgcagcatccagaatacggtgtgtcggaagaataagatgagctttctttgaaatgtgcaaacgttctttcagcggatgacccgatgcttcaagtgcttctgcctctgctttaaacaatgccggatcaagtaccacaccgttaccgatgatgtttaccttgtttccttgaaaaataccggaaggaatagagcgaagcacatatttctgtccttcaaactcaagcgtgtgaccggcattcgggccgccctgaaaacgagcaaccacatcatacttaggtgttaaaacgtcgactacttttcctttaccttcgtcgccccattgtaatcctaatagaacatctactttcatttttcttttttattgttgttatttacttttttccgtttgttagctctgtcgcacttactacatactccatatatatataaggagtaatgcgaaagctggaagcggctcaatttcgtattttcaatggcttgctgcagttcctcgttctgaaactcggtcactttaccacattgagtacatatctgatgatgatgtgtctcgcgattatatgatttttcgtattgggaggaagtaccgaactgatgcttaatgaccagccgtgcattgataagaagaataatggtgttgtagagagtcgcccggctcacccggaaattctcctggtccatcattcgtgaataaagcatgtcaatatcgaaatgaccgtcgatagaataaatagtatcgagtatggcgtagcgttcaggagtctttcgatgcccgttcgccgtgagatattccgtgaatatctgccttactgtatctttcacgttttgagtttccatcatcagccaaaattagcgcgaacaaagttaagccttttttgcggaaagcaaatgataaagagaagtttttttagttcatcacagagttagacagtttttttataaattaaatggaggctatcattcgttttgtagattggcttatataataaacgaataacaagacggtttattttttagacgcgtcatccgtgttatccgcgtctaaaaaattaaaccgttatttaataaaaggacttactccatgaaaataagattagtctacagcaagctcttctttcaccatattgtagagcatctgctctccttccaaagtagaatcagccataccttccaccaggcggcatacttgaaaagcatgttcctcgctatgctgcatatatttgcggataaccagcaaagctgcgttacgaatatgatagctgtcggaatgtaccgcacaaatcgcctggtcgagcaattcgccggaggcacgttcggtcatatcccctttcttcatcagaagacgggcggcagtcaggaaaccacaagtctgcacgtactcctgttcgtcggcaatccagtgaaaagatttggccggagcatacggtaaatgctggaagagattcatacaagtcagttctgctatttcgatattccggatgttttccacccaaatatcggctatctcgggataaaacgtttcgatcggctgaagcattcccgccagaatcttacactcacgaatttcctctttccataaagcctgcgccaggtcatgattcttttcgtaaccttcggcaatcatcttgatacgaggcagttccactccgaaattgagtttataaaccagccctttctcgcgcatactttgggacacagccccgttcatagagagacggagctgtgtcttgatatctttcaattgttctttaatatccatttcagatcagttgtttatggaaggcagcggagaataatcagtgctgtaacgcaacatttgttctacataaccttcatcataagaaactgtgacatccgtaacgtttccgttttcatctgtcaccagttcgtatttcggattcacaaaacctttataaggagccagattcaacttcttataacgttccagaacttctgcatgtaaagccggatctacttttacggcatagttttctaccaatgaacgggcaccttcaaagtcgcctgtcgatttgattcgctggatttcagccaacaattcgccgaaaagctcgcgtactttctgatagtcattgataaccacataagtctttccgtctttcttcaccaattccaccactttatcggcagcccccttctcaaatacccaacgggctatcaactggcggttacgcatgtgagcttcttccacagtatttcccggttcgatacgtaccaattgcgtcatcagaccgttcatcagataagtataatattgagctttataagcatcgggagaagagagaagtcccagttccaccagcttagggtcagccacataatacaatccgaacaaatcggcacgcgcctcttcgatggtagagccgtatgctttcaaagcatcaggatctacctccggaagtaacttaccggaaccgtgtcctaaacattcgtgcaagtccgtatgcagctcatccgttaaatcagaatacgcatcgatcagttgtatttccgcatcgctataaacaaattcttcgttgaatccgtttccgtgagcggctttattataagcatctgttatatttccgattgtcaccgatttagagccgtggtgagcacgaatccagtttgcattcggcagattgataccgatagccgttgccgggtaaagatcacctgcaaggatagcggcagtaatcactttagccgataccccttttaccttttctttcttgaaagatttatctaccggagaatgatcttcaaaccactgcgcattgctactgattatctctgtgcggtgcgttgattccaaatctttgaaattcaccaaagactcccagctcgctttcatacccaacgggtcaccgtaactttcagtaaatccattcacaaagtcgattcgtgaatcaaggtctttcacccaaagaatggcatattcatcgaaatctttcagattgcctgtttcatagaattgaatcagtttggtgatgacggccttttgtgcctcattctctgctacaccttccgctttcttcagccaataaacaatcttctctattgcctgtgtatagagtccgcctactttccaaactttctcctccaactttccgttttctttgaccagccgactgttcagcccgtaagaaaccggtgtttcgtctttcgggtctttcagggcgctataaaaactctctgcctctttctgcgtcactccgtcataatagttacaagcagaagtcaacacaagatcttcgccatctgcctggtttacccgtttcggcataacagtcggatcgaaaatcaccggaaacagttcggcacaaagttgttcggcagtctgtcctttcgccaacggcagcaacttggcatctataccgagtacagcctgtttcaagaactcctgcgagaagttgggcacgaatttctccgtaccatagtggtgatgaataccattggagaaccatacccttttcagatacacctccatatttttaaaatcaggcgttgttttatctccctgatagtttgtatatactgcttcgagcatccgacggattctcaaattatattttccattctggtcaaacagaatatcccttccctccagagcagcctctgtcaggtaataaatcagttccttctgtttcagcgtcagttcttcaaatccgggaactttataacgcaatatctgtaaatcagcaaattgttccactgtataatcaaatttgtctgcttcagcagttgttgttttacttcctccgcacgatgttaaaagcgtagcggccactgtcattaaaatcagatgttttttcataatgctagcattgattaattaaaatgagaaaaggaattatctccaaaatctttcatttagaggtaattccttttgactaatttcggaacgcgcaattatttcttattttcgagatgttttttgcgatatccattaggagtctcacctacgtttttgtaaaatgcagcgtaaaaagattgacgatttgcaaagccaaccatggcactaatttcttccacatttttgtcggcataacgtttgtcagtcaataaatgcaaagcatcttttactctgtattcattcaacaggcaagaatagttcatgccaaagcgtgagtttactactgcagaaaggtaacgagtattcgtcttcaattctttcgccaagtccttagctgaatagtcaggatccttgtacttcttctgtacaacgatgatattcaggatcttgtcatacaactcgtctgccaattccggtctaatcaaagacctgtatgcagccttcttttctttcttttccctcaaattgtagggacgttttttcggagtttcttccgtttttttgttctctaaatcgctcattgaattaactggttagggtttgttcatttgttaataattgctcatttgcaacgtaacatgttacaaatgtcttactttttttttaaacacacaattattttgtgcattttttttctaaataaacaatcaaaaaccttgaaaaagaaggaatgagtccgaataataagaaactttaacttatttataattcatatcagaaacagaaatctacacatgatgaaaaattgccaaagaaaaatgtacctttgcagcatggataaatcagcatcaatgagagagactttaaagacatatttcgggtacgataatttccgtcctctgcaagaagaaatcatccgacacatcctgaacaaacaggatgcattggtattaatgcccactggtggggggaaatcaatctgttaccaacttcccgcactgctttgcgaaggtactgccgttgtcgtttctcccctcatctcattgatgaaagatcaggtagaagcattgctggcaaacggcatcgctgccggagcgctgaacagcagtaatgacgaaacagaaaacgctaatctgcgccgcgcatgcattgaaggtcgcctgaagctgctttacatttcaccggaaaaacttttagctgaaaaggactatttgttgcgggatatgaacatctctctgtttgctattgatgaagctcattgtatttcgcaatggggacatgatttccgtccggaatacacacaaatgggagtgctccaccaacaatttccgcaaataccaattgtcgcactaactgccaccgcggataaaatcacgcgtgaagacatcgtacggcaattgcatctgaaccatccgcgtaccttcatttcctcgttcgaccgtcccaacatcagcctgactgtgaaacgtggatttcaagcgaaggaaaagaacaaggctatcttagaatttatccaccgccacggggaagaaagcgggattatttactgcatgagtcgaagtaagacggaaaccgtcgcacagatgttacagaagcagggtatccgctgcggtgtttatcacgccgggttatccactcaacaccgggacgaaacacagaatgattttattaacgaccgcatacaagtggtatgtgccaccattgcttttggaatggggattgataaatcaaatgtccgctgggtgatacattataacctgcctaaaagtatagaaagcttttatcaggaaataggacgtgccggacgtgacgggcttcccagcaatactgtcctgttttattcattaggcgacttaatattactaactaaattcgcttcggaaagtaatcagcaaaatatcaatctggaaaagctccaacgtatgcagcaatacgcagaggccgatatttgccgacgaagaatcttattaagctacttcggagaaacaacaacagaggattgcggtaactgcgatgtttgtaaaaatccccctcaacgattcgacggtacagtcatcgtgcaaaaagcattaagtgccatcgcacgcacagaacaacaaatcagcacaggagtgttgattgatattcttcgtggaaactattctgcggaagtaaccggaaaagggtatcaggaacttaaaacgttcggtgccggacgcgacattcctcctcgtgactggcaagactatctgcttcaaatgctgcaactcggctactttgaaatagcttataatgagaataatcatctcaaaataacgtcaagcggaagtgatgttctcttcggaaggacacaagcggcattggtagttatccagcatgaggaagcagttacccgaaaaggaaaaaagaaaaaagtggttatcgccaaagaactcccctttggtgcggcaggtggcgaaagccaagatttgttcgaagcattgcgaggattaagaaaacagcttgccgatcaggaagctttgcccgcctatatcgtattgtcagacaaagtgttgcatctgctttgcatctcacgtcccaccaccatcgaagagtttggagaaatcagtggtatcggcgaacacaagaaaaagaaatatggaaaggatttcgtaaatctgattagacagttcgtagaataaaagaaattcttgaatagtatatattaacgagtcacctgactaatgattattcgttccactaaggttatctttccgttccacagttgtttccctttagttccacataggtagaactaaagggaaacaactgtggaacgaactaatgtccatagcaaaaggcgctcacttatgtaaaccggaaagatatagttggcttattaataacttcacttgcattgccgcaattgctcgtgcaaatcagccggaggcactcccaatgaaatagctttttcaaagtcagcttttgccaatcctttcttcttctgtgccaggtagatatttccacgcaacagataagcatcagccgaggcagcatccaaccggatggcttcctccaaatcgaccaacgccaagtcttcatgtttcatctcacgttccacatcggcacgggcaatatagagcgtcgcatcttcaggagtggccgcaagcatcttattcaatatttcaagagcttcccggaattttccttctttctgctccaaagtagccagtcccagccgtccgctatagctctgcggatcgagttccaataaacgattataatctattctcgcagccggataatcgcggcggagcacataaatataagcacgcatcaacaaagcttctttgttctgcttatcctcgtccaacacctggcaataatccgtataagcacggtctgtttttcccatttccatataaatggcggcacggtcgagcaaaatagggactgccaaaggagcaaagttcagtgcaaaagaataagattccaatgctttatcaaactcgcccaaacggcgctgaaccaatcccaagttagaaaaaagcagtgcattctttgcgtttttcggttccaacttcaaagcctgaagcaaaagttcctctgcctggggaagactgtctttttcgatacactcaatggctctctcggacaattgctgataggtttgcgcaaaggtaacagccggaaaacaaaaaagcaaagctataattattcttaccatggttcagatctttttatagtgaatgaattaatccaatggatatgcgtcaaaagcaaacagttcggtcgacaaataacgctctcccgtatcaggtaacaacgctactatttttttgttcttaaattccggacgttgtgacagttgacgggcggcatacacagctgctcccgaagaaatacccgccaacagaccttctgttgccgctaactcacgtcctgcacgaatcgcttcatcatctggcacgcctattacttcatccaccaccgaagcatcataaagcttcgggataaaattcgctccaataccttgaatacgatgcgaggccgcctctccgcctgccaacactggagacgatgccggttccacagcaacaatataaatattcggattatgtttcttcaaagcacgagctaccccgcagactgttcccccggtaccaactccggctacaaaaacggccacttcaccgtctgtatccctccaaatttcttcacccgttgtccgttcatgaacagcagcattggcgggattttcaaattgttgcaaaatcaccgaaccgggaatactatcacgcaactcctgcgctttggcaatggaagctgccatccctcccagcccatctgtcaatacaatctgcgcacccaacgctttcaacagattccgccgttccagactcatcgtttcgggcatggtcaatatcaggtgataccctttaatagtagccaccattgccaaccctacacctgtatttccgcttgtcggctcaataatcgttgcaccgggtttcaatgctccacgagcttccgcatcttcaatcatcgaaagagcgactctgtcttttacacttcccgccggattaaaagcctccagtttggcaataatattttgttccagaccatactttccactataaccggaaagttccatcaaaggggtattccccactaaatctgttagtttctttgcaatctttgccatcttattacttcatttttgtcacaaacacgacaaagatatggaaaaaaaggtatgttttacatcacatcatgagaaagataaggaaaagtatagtaactttgtatccgttcaatctttttaagtttacatatatgaaaaagagaattatacaatttctcacgacctattttttatttgttcttttattcgttcttcagaaaccaatcttcatggtttactaccatgacttatatactaatgtatctttgggtgactatttccgcgtcatgtggcacggattaccactggatttatctcttgcgggctacctgaccgctatccccggaatcctgctcattgcttccgcctggacaaattcatccatactccgccgcatccggcaaggatatttcggagtaatagcctttgtcatggcctgcatttttatcatcgacctgggattgtatggcttttggggattccgtctggacgccactcctattttctattttttctcttctcccaaagatgccatggcaagtgtcagtttttggttcgtactacttggaattctggctatattgatctatgcagcaattctatactgtattttctattgtgtccttatccgggagaaaaagcctctgaaaataccttatcgacgccagaatgtctcgcttgcactgcttttgctgacagcggcactcttcatccctatccggggcggattcagcgtatccaccatgaatttaagcaaggtgtatttcagtcaggaccaacgcatgaatcatgcagccattaatccggcattcagcttcatgtattctgccacccatcagaataatttcgataagcagtatcgcttcatggacccgaaaatagccgacgaattatttgcagagatggtagacaaacccgtcgcagtaaccgacagcatcccccaattattgaatacacaacgcccgaacattattttcattatccttgagagtttctccacacacttgatggaaactttcggaggacaacccaatgtggctgtcaacatggataaattcgcaaaagaaggcgtattattcagcaacttctacggcagcagtttccgcacagaccgcggactggcatctatcatcagcggatatcccggacagccgagcaccagcatcatgaaatatcccgaaaagacggacaaacttccttccatcccccgcagcttgaaaaatgcaggatacagcctcgaatactactatggaggagatgccgatttcaccaatatgcgctcttacctggtatcttccggaatcgagaagattatttccgataaagatttccctctgtccgaacgtaccggaaaatggggagcacaagatcacgttttgttccaacgcctgatgaaagacctgaaagaagaaaaacaagaagagccattcctgaaactggttcagacatcaagcagccacgaaccattcgaagttccgttccacaggctggatgataaagtcctcaactcctttgcgtatgccgacagttgtgtgggaaatttcgtgaaacagtatcaggaaacaccgttatggaaaaacacactgtttgttctcgttcccgatcatcagggtgcatacccatacccgatagaaaatccgctggacggacaaaccattccgctgattttaatcggaggtgcaattaaacaacctctcgtaatagatacctatgcttcgcaaattgacattgccgccactttgctcgctcaattaggattgccgcacgatgaatttactttcagcaagaatatcctgaatccgggttctcctcatttcgcatactttacccggccggattatttcggaatgattactgccgataaccaattggtgtacaatctggacgccaataccgtacaactggacgaaggcaccgccaaaggagctaacctggaaaaaggaaaagcgttcttacagaagctctacgatgatcttgccaaacgctaattattaagaaatatggaatatttataaggtaatataggacatttactattctttattgtatatttgcgacgttaaaaatagatcaataaagccggatgatacatagcgaaatcgtgcaattcctttcggagatagatacaaatatcttcttatctttcaatggtatacactcccctttctgggattatttcatgagttcctttacgggtaaaataatctgggttcccatgtatgccaccatattatacatattattaagaaatttccattggaaggtagtcgtatgttatgtggcagctatcgcgctcacgataacctttgccgaccaaatgtgcagcagtatcatccgcccggtagtggcacgcctgcgtcccgccaatccggacaaccctattgtggatatggtatatatcgtaaacgggtatcgtggaggaagttatggtttcccatcgtgccatgcggccaattcattgggtcttgccatgtttgtagtatttctgttccgtaaacgttggctaagtattttcatcgtaacttgggcaattcttaactgctatacacgtatatacttgggtgtacattatcccggtgatttactcgtaggaggtattatcggaggattcggcggttggctattctgtactatcgctcacaaaatagccatttatttggaaccttccacccgtacgaagagaaaagatataaaacaatggccagtcactatttatgtaggattgctgacagtgctcggtatcattatatattccataattaaaagctggtaaggttcaccacagattgcacagattcacacagatttcaaatgataaaaaagatattccacaagaagaatgaagagtaagtggagttatcaaacaaaatctgaatattaaaaatcacccacgttatagatagctataacgtgggtgaaattatttataaagggctgttatacagctccatcagcaatctgtgtgaatcggtgtaatctgtggtgtagaatatcaagctttcttgatataatcaacaatccactgtcctacttctttcgttccgtatttagcaccgtcagccacctgaatttccggtgtacgtacattctcatccaaagaagcgtctactgctttacgaatcagcgcaccttcttctttgcaatcgaaatactcgaacaacatagctacggaaagaatttgtgccaacggattagcaatattcaatcctttagcctgcggccatgaaccgtgaatcggttcaaacaccggagtactctcgcctgtggaagcagaaggaagcaagcccatagaaccactgattacagaaccttcgtcagtcagaatatcaccgaaggtgttttccgttaccatcacatcgaagaaagcaggttcctgaatcatcttcattgcagcattgtccacaaacatataatctgttgtcacttccggatagttcggagccatttcctgtgcaatctgacgccacagacgggaagaagccaacacgtttgccttatctaccaccgtcaggtgttttctgcgcttcatcgcatattcaaaagccactttcaagatacgttcgatttccgggcgagtataatagttggtatcatacgctttgtcattatcctgatacttttcaccgaaatacatacctccggtcaactcacggatacagataaaatctgcgttctctaccagttccgcacgcaacggagatttgtgaatcaggcatttgaatgtctgcaccggacggatattagcgaaaagtcccaatttcttacgcatcgccaacaaaccttgttccggacgtaccttagcagtagggtcgttatcaaatttcggatcgcctacggcagagaataaaacagcatccgcatctttacaaacctgataggttgcttccggaaacggatcgcctactttatcaatcgcatcagctccacagattgcatattcgtaacttactttgtggccaaacttctcgcaaacagcactcatcacatctacaccttgcacagagatctccggtccgatgccgtcgcctgctaatacagcaattttaaaatccataatcgtttattcttctatttatatattcttataaaaaacattctttgggcaagttatctctcacttgctcttctcgtattcatcttcgatgaggttcaacatcttcatagtagctttgatggcagcttccgtctgatcggcatcaagtccgcgggtacggaacacctgctcgtcataactccatgtgattactgtctgcacaaatgcatccgtgcgcccaccaggagggattgtcaccgcataattggtcagcatcgggaatttgcgtcccaatgtcaccttatatatcttacgcaatgcacgaacaaaagcatcatactggccatcaccgcctgaactctcttcgtactcttttccgttgatttctatcttcaacgtagccatcggtttcaatccatgagccagattcacaaaatagctcttcagtttgaccttctcaccaatcgctccatgcttcaacacatcagaaacgatgtacggcaaatcttcctgtgtcaccaattctttcttgtcgcccagttcgatgatacgctccgtcaccttgcgcatagcatcttcatccagctccaatccgaggtcttcgagatttttgcggatattggctttgccgcttgtcttgcccaacgcatattcacgtttacggccaaagcgttcgggaagcaaatcattacagtaaagattatttttgttatctccgtcggcatgtactcctgccacttgcgtaaagacattctcacctacaatcggtttgttggcaggtatcataatgcccgaataagactccactacccggctgacatcattcaaacggctctcgtcgatattggtcgccgcattgaaatgatctttcaggatggcttgcacacttgcgaggggagcatttccagcccgttcgcccagtccgttgatggtggtatgcagtcctttgacaccgcttaatacggctgcaagaacgttgctcactgccaaatcatagtcattgtgcgcatggaaatcgagatgagtattcggataacgtttcttcatcttccgcatatactctatcacttgcaagggattcaagatacccaacgtgtcaggcaacatataacgcttgacactcgtctcttgcaatccatccatcaactggaatacatattcgggagaatccttgataccgttactccaatcttccagataaacattgacggttatatcctgctcgtcggcataatgcaccacattaatgatatctgccagatgttcttccggtgtctttttcagttgttgcgtacaatgcttcagtgaacctttgcaaagaagattaatcacgcgacaaccagtacgctgaatccaatcgacagaagtatgcccgtcaacaaagccgagcacttccactttatggagcagattacgacgggccgcccagtcgcaaatcatcttcacggcttcaaactcaccgtccgacacacgcgccgaagcaacctccacccggtctaccttcaaatcttctaacagcaaacgggcgatcattagtttctcatgaggcacgaaagatactccgctggtttgttcaccatcacggagcgttgtgtccatgatttctattttcacgccttcttttcccattcttctattttatctttattgcttaacaagaaatcgatatcgtccaatccgttcatcaaacaaagtttcttgtaagcattgatttcaaaatgttcacttttacctgtcgccttgttggtgatggtctgttcgggaagattcacttccacttccatcttcgggtctgcttctatcgaatcgaacaattcttgcagaaactcttcggttacaaccaccggaagcacaaagttgttcaactcattattcttatgaatatcggcaaaaaaactggataccaccacacggaaaccatagccggcaattgcccaggctgcgtgttcacggctggaacccgaaccgaagttcttacctgccaccaatatctgtccgctgtaagtagggttgttcaacacaaaatccttgttcagggaaccatctgcattgtaacgccagtcacggaaaaggttatcaccgaagaatttctcttcacgagtggttgctttcaagaaacgtgccggaataatctggtcggtatctacgttttctaaaggaagaggtacacaagtacttgtgattatattaaattttgtcttagccatcgccttatttatgaattataaattatgatttatgattgaaattacatcagttctctcggatcggtaatcacacctgtcaccgcagcagcagcagccaccagaggactagctaacaaggtgcgtgcaccaggtccctgacgtccttcgaagttacggttgctggtagataccgaatattttccggcaggaatcttatcatcgttcatcgccagacaagcagaacatcccggctgacgaatagcaaatccggcttccgtcaaaatcttgtcgattccttccttacggatctgtgcgtctaccatccatgaacccggaaccagccatgcaattacattttccgctttcttgcgacctttcacgatggaagcaaatgcacggaaatcttcgatacgaccgtttgtacaagctccaaggaatacataatcaatctttttgcccaacaaagattctcccggttggaatcccatgtagtccattgatttcttgaatgaaacctgtgcagcttcgctcattccttccatcgtaggaatgtgctgtgtgatgcccatacccatacccggattcgttccgtaagtaatcatcggctcaatatcagcagcttcaaaacggacttccttgtcgaatacggcatcgtcatcactcttcaatgtcttccaatatgccaaagccttgtcccatgcttcgccttgcggagcactttcacgtcccttgatatattcaaaagtcacttcgtccggagcaaccatccctccacgtgcacccatttcgatagaaaggttacaaagggtaagacgtccctccattgtcagattgcggatagccgaacctgcatattctacgaagtaaccggtagcaccgctggtagtcatcttggacatcatatacagagctacatcttttgcagtcacccctttgcccagttcaccgtctacggtgatacgcattgttttcggtcttgactgaagaatacattgcgaagccaataccatttccacttcacttgttccgatgccgaaagcgattgctcccatcgcaccatgagtagaagtgtgagagtcaccgcagacaatcgtcattcccggcaaagtcaaaccacgttcgggacctaccacatggataattccattcttcggatgcatcataccgtagtgtgtcaaaccaaaatccttcgcattcttagtcaatgtgtcgacctgcgttttagaaatcggatcctcaatctccttatcctgatcgtgtgtcggtgtattatggtcgggcatacaaaataccttttccggacgcaacactccgattccacgttcacgcaatccggcaaaagcttgcggactagtcacttcgtgacaatataagcgatcaatataaagctgtgtaggaccatcttccacagtagtcaccacgtgggcatcccatatcttatcaaataatgtattcatctgtttatttactattttactaattactatttactattttagtcaacctctacaatgccgatacgactgtcagtctcttttttatgatttgaatttattaatacagtcaatataagcttctacggaagcggcaataatatctgtattagctccaaaaccataataaatctggttatcgtattctacctgcatgtgtactttacctacatcatcacttcccttgctgatagcctgaatagtaaactctttcaaagtcatgtggcgttctacaatcttcttcaatgccttgatagctgcatctaccggaccgttaccactagcacaagcctcaaacttctcaccggcaatgttcaatcccaaactagctaccgaacgaacgccgacaccactcgtcacctgcaaataatccagtttgatgcgatgattctggctacggtctgcgcctgccaatactaaaatatcgtcatcattaatatcttttttcttatcagccaacttcaagaactcatcatataccttatccagcttttcctgctccaggtcaactcccaaaatagaaagacgatttttcaatgcggcacgtccgctacgggctgtcaatacgatagagttatcatcaatacccacatcatgcggatcaataatctcatacgtctgtacattcttcaatacaccgtcctgatggatacctgaagaatgtgcgaaagcattacgtccaacgatcgctttattcggctgtactggcatattcattaagctggataccatgcggctggtcggataaatcttctgtgtattgatattggtctgaatatctatttcgtggtgacttttgataatcatggcgatttcttcgagggcagtatttcctgcacgttcgccgataccgttgatggtcacttccacctgacgtgcgccgttcaaaacaccggctatcgtattggcagtagccatacccaagtcgttgtgacagtgagtagaaagtatggcattatcgatgccgtctacatggtcgatcaggtattttattttagcaccatattctgaaggtaagcaataacccgttgtatcaggaatattcactacggtagctcctgctttgataacggcttccaccacacgtgccagatattcgttatccgtacggcctgcgtcttctgcataaaactctacatcgtccacaaaacggcgggcgtatttcacggcagctaccgcacgttcgataatctcttcacgattcgaattgaatttatatttaatgtgcgaatcagaagtaccgataccggtatgaatacgtttatgtttagcaaatttcagtgcatctacagcaacatcaatatctttttgaactgcacgtgttaaagcacagatagtaggccaagtcaccgcttttgaaatctcaatcactgaattaaaatctcccgggctcgaaatggggaatccggcttcaatcacgtctactcccaacgcttccaatgcctttgctacctgaatcttctctactgtattcaactggcatcccggaacctgttcaccatctctaagagtggtatcaaaaataaataacctattgtccatattcaatgtatattatataattattagcattaaaaaagcctttcacacttggaagtgagaaaggctttcgtatattttcatttatacacatttacgcgcagcactcacttccactaacctttgatagtagaataataataccgcatagtagaatatgtataaacatctggttcatttcttgtctcttttatagtttgacggtgcaaaggtatggattatttcttttccaccaaataatacgttacttttttatcgaaaaaaatatcatttcataagttaaagccgatttttaccaaaaatatatcacgaatacaggtctatatttcattaaaagaaaagagggagcagaatgtttttcagcattctctccctcttcttctttattgttctaaatcaatagattacttcttatcgcaacattctttcttttctgcgcaatctgcttttttgtcgcaagcagtagcacaagaatctttagcctggcagcaagaatcagattcaacaacagcttctacagtttctacggttgtttcttcaccttcagaagcagcgttagtagttttgttaccagcacaagacatcattgcaaaagaaaatgttactgctacagcagccaaaaataatttagttttcatacttttcaaatttgctttaaacgtttaataaaataattgtcggtcgcaaatataacactttttttgcaaagtaccaaacaacagaaagccccttgattcgttgctgaatcaaggggcttctctaaaaacggcggctacctactctcccactgttacgcagtaccatcggcgtgacgaggcttaacttctctgttcggaatgggaagaggtggaaccctcgtgctataaccacctgaataaggttatgacatgatgaaaagtaaaatctcaagttcattactagtatgtttctgttctctgtttccagtttctgtatcagtaatccgctaaacgtatatacccaaccggtacatatttgaaagaaagtgaacgggcaattagtaatgctcggctttgatgttaccacctttacacctgcatcctatcaacgtcatcgtctttaacgaccctaagaaatctaatcttgtggctggcttcgtacttagatgctttcagcacttatccaatcccgacttagatacccagcgatgcacctggcggcacaactggtaaaccagcggtcagtccaacacggtcctctcgtactagtgtcagagccacgcaaatttcatacgcccacgatagatagagaccgaactgtctcacgacgttctgaacccagctcgcgtgccactttaatgggcgaacagcccaacccttgggaccttctccagccccaggatgtgacgagccgacatcgaggtgccaaacccctccgtcgatatgagctcttgggagggatcagcctgttatccccggagtaccttttatcctttgagcgatgtcccttccatgcggaaacaccggatcactatgctctagtttcctacctgatcgacttgtctgtctcccagtcaagcgcccttatgccattacactctacggacggttaccaatcgtcctgagggcacctttagaagcctccgttacacttttggaggcgaccaccccagtcaaactacccaccaaacagtgtcctcgcatctacgagttagaactcaaataatcaaagggccgtatttcaacagcgactccacaaatactggcgtacctgattcaaagtctccggcctatcctacacatcaattacccaaattcaatgttaagctatagtaaaggttcacggggtcttttcgtcccatcgcgggtaatcggcatcttcaccgatactacaatttcactgagctcacggttgagacagtgtccagatcattacaccattcgtgcaggtcggaacttacccgacaaggaatttcgctaccttaggaccgttatagttacggccgccgtttactggggcttcaattcaatgcttctcttgcgatgacatctcctcttaaccttccagcaccgggcaggtgtcaggctgtatacgtaatctttcaatttggcacagccctgtgtttttgttaaacagttgcctggacctattctctgcgcccaactctcgttgggaccctttatcccgaagttacagggtcaatttgcctagttccttaaccgtgaatcactcaagcgccttagtatattcaacccgactacgtgtgtccgtttgcggtacgggtaccttaaagattaagtttagcggattttcttgggagtatgtttacacgcactattggattgttccgaagaacgttccatactatcaggttcgactctctttgtggatttgcctgcaaagatcaacatctacacccttcaacggactattccgtcagtccgcggcgctatcactgctccgtctccacgtcactccttaaggtagtacaggaatattaacctgttctgccatcggcctcaccgttcggctgagccttaggacccgactaaccctgatccgattagcgttgatcaggaaaccttagtctttcggcgagggggtttctcaccccctttatcgttacttatacctacatttgcttttccacacgctccagcaaagctcacgcttcaccttcgacgcagagtggaatgctcccctaccgatccttacggatcccatagcttcggtaaattgcttaatgcccgattattatccacgccaaactcctcgactagtgagctgttacgcactctttaaatgaatggctgcttccaagccaacatcctagctgtcttagcaatctgacttcgttagttcaacttagcaattatttcgggaccttagctgatggtccggattcttctcctttaggacatggaccttagcacccatgccctcactcctgggatcgaactactgcgcattcggagtttatcaagacttgataggcggtgaagccctcgcatcttatcagtcgctctacctcacagtagtaattcccaaggctgcacctaaatgcatttcggggagtacgagctatctccaagtttgattagcctttcacccccaccctcagttcatccggaagcttttcaacgcttatcggttcggtcctccagttagtgttacctaaccttcaacctgaccaagggtagatcacttggtttcgcgtctactccttccgactaatcgccctgttcagactcgctttcgcttcggctacacattttgaaatgcttaaccttgccggaaaaagtaactcgtaggttcattatgcaaaaggcacgccgtcactgcttacgcagctccgaccgcttgtaggcgcacggtttcagggactatttcactcttctattcgaagtgcttttcacctttccttcacagtactggttcgctatcggtctctcgggagtatttagccttaccggatggtcccggcagattcacgcaagattcctcgtgtcccgcgctactcaggataccactacgcttcgtttagcttcgaataccggactatcaccgtctatggtttcattttccaaagaattcttctcactaaatttcttgcgacatcgtggtcctacaaccccaatattgccgtaacaacattggtttgggctaatccccgttcgctcgccactactaggggaatcattattattttcttttcctacaggtactaagatgtttcagttccctgcgttagcctcttgctatgcaagatgtcattccttcagaatgacgggttgtcccattcggaaatcttcggatcaaaggttatttgcacctacccgaagcttatcgcagcttatcacgtccttcatcgcctccgagagccaaggcatccgccatgcgcccttgcttactttctttcaaacgttttattctcataatggtattgacttgggaattgcttccgactgtcaatattgcatattcgaacacgtacggtttgatatatacttttagctcttacttttaattttactttttgtacatcatgtcaaagatcgtttctcttttcagagagagtggagaataacggattcgaaccgttgaccctctgcgtgcaaggcagatgctctagccagctgagctaatcccccaagaggttattcaagaatgttgtttttagtttttagcttttggctgtcactattccttgttcttgagcttggtagtccaaggcagagttgaactgccgacctctacattatcagtgtagcgctctaaccaactgagctataggactagttcaaccttgtctacctgatgttagactcggcttcttgtttctcttgtttatctctatctatacttctatagatggttgatctatatattataaataaacaagtaccagtagtacaaaaacagaacctttaaagtcattatttttaacgatgggcgttttacattattcatgtagaattgcatcgtcttacgacatcgctccagaaaggaggtgttccagccgcaccttccggtacggctaccttgttacgacttagccccaattaccagttttaccctaggacgctccttgcggttacgtacttcaggtacccccggctttcatggcttgacgggcggtgtgtacaaggcccgggaacgtattcaccgcgccatggctgatgcgcgattactagcgaatccagcttcacgaagtcgggttgcagacttcgatccgaactgagagaggtttttgggattagcatcctgtcgccaggtagctgccttctgtaccccccattgtaacacgtgtgtagccccggacgtaagggccgtgctgatttgacgtcatccccaccttcctcacatcttacgacggcagtctctctagagtcctcagcatgacctgttagtaactaaagataagggttgcgctcgttatggcacttaagccgacacctcacggcacgagctgacgacaaccatgcagcaccttcacaacagccttacggctatactgtttccaatatattctgttgcaatttaagcccgggtaaggttcctcgcgtatcatcgaattaaaccacatgttcctccgcttgtgcgggcccccgtcaattcctttgagtttcaccgttgccggcgtactccccaggtggaatacttaatgctttcgcttggccgcttactgtatatcgcaaacagcgagtattcatcgtttactgtgtggactaccagggtatctaatcctgtttgatacccacactttcgagcatcagtgtcagttgcagtctagtgagctgccttcgcaatcggagttcttcgtgatatctaagcatttcaccgctacaccacgaattccgcccacctctactgtactcaagactgccagtttcaactgcaattttacggttgagccgcaaactttcacaactgacttaacaatccacctacgctccctttaaacccaataaatccggataacgctcggatcctccgtattaccgcggctgctggcacggagttagccgatccttattcatatggtacatacaaaatcccacacgtggaatactttattcccatataaaagaagtttacaacccatagggcagtcatccttcacgctacttggctggttcagactctcgtccattgaccaatattcctcactgctgcctcccgtaggagtttggaccgtgtctcagttccaatgtgggggaccttcctctcagaacccctatccatcgttgtcttggtgggccgttaccccgccaacaaactaatggaacgcatccccatcgataaccgaaattctttaatagtaaaaccatgcggttttaatataccatcggatattaatctttctttcgaaaggctatccccgagttatcggcaggttggatacgtgttactcacccgtgcgccggtcgccatctttagtttgcaagcaaactaaaatgctgcccctcgacttgcatgtgttaagcctgtagctagcgttcatcctgagccaggatcaaactcttcattgtaaaagtatctttttcatctgttaagatgattttttttgctctgttcaggatgccgtaaatttattgaccttattcaaatacctattatcttcaatcgtatcgctactctctcggacaagtattgacggttctatttttttacttgtactacttgtattgtttatcaatatttcaaagaacttgctgctttcgtttcaaaagcgggtgcaaaggtaaaggctttatttttaactaccaaactttttcggaagtttttttattttttcttttcactcatttctcagactctctatgcgaaagggaaagaatgtataaaagaaaaacaaaggccgttttctttgcgaatcggactgcaaagataagaactttatttattatactccaaaactttttggaagtttttttgttcttttctttaagcgcaatctcgctttttcactatgtcaattctgcaaggctttcttctcttggaaagcgggtgcaaaagtacgcccttttggtatacaatccaaatatattaaactattttttcgaagtttttttgaaagaatctgctaaagcgctgaaagataatgatgttgtagaacgtatttttttatcatgagtggattgcgggcgaaaacggtacacatgggatacattgttatatcacacgcgggcgcgtaggcgcacgcaagagagaaaaagatgcagaaaaaagaaataacaaaattacagtcgaattacagatgagaaaaagacaacaggaagaaagagacaagaagacaatatagaaggaaagcaagaaaatgaaccaaatgtaaaaagaatactagggacataccacaaagggaaattacaaaaggagattattaaaggggatggattaattggaatggttaattgggcatgaccagcagaatacaggatattcagcgacgcagcgccactagaaatgatttctcattttcatttctcatattctcatagcttgcacaataatcaactgtaaatcatcaatataacactatgagaaataaaataaaaaaggcatttctcatagtattaccaacgttttatactgaaaacagtgcatttctcataaactttcaaatcatttctcatagtattttgactatttatcctataaattctcaagctagatcctaaactaaagaccaagttgaataccagactagacactgctttacaatacattatcagtgcttattgaaagtatatagagcagacattcgcatattttcctacctgcatctgcatcgttgcactccagtgaacaggcctgtgcactagagtagaaagaaccgtctactcgagtgcaacgatctgttcactggagtgcaacagggcagacgcattatattttttactatattctcgtttgtaatttccttactatattgttggttattaacatattatcatttgctaatgtcgattattttccttatctttataagatatattaaaacataaactaacatgaaaattggcataattgacctttgtaaacaaatagaagatcctaggatgaaccgcaaaaaagtacataaaatggaaactattatctatatatccattgctgctgtaatctgtggcgctcaatcctggaatgagattgaggaatttggcaatgcgaaaattgcttttttcaaaagtcgcatacctggtctggagttcatccctagtcatgatacttttaatagattcttcagtataataaagcccgagtattttgagttgatcttccgtaattgggtaaaacaagtctgtcaggaggtgaaaggcgttgttgctatagatggcaagctcatgcgtggtccaagccaatgtgacggagaacatactacgggaaaagaaggattcaaattatggatggtttctgcatggtctgccgctaatggaatttctttaggtcaggtaaaagtagatgataaaagcaatgagattacagctattccattgttaattaactctttggaactaagtggttgtattgttacaattgacgcgatgggatgccagaaagatataacccagaccattattgagcataatgcaaattatattatagctataaaggagaataagaaaaaaaattatcaactagctaaacaaatcattgacgattatcaggatagagatgaaataaccaatagagtcaccaggcatgtgtcggaaaacaccggacatggaaggattgagacaagaacatgtactgtagtcagttatggatctattatggagaaaatgtttaagaagaaacttgtggggttgaagtctattgtagggataaagtcggagagaacaatagtagcaacaggagaatatactcaagaggtcagatactatgtaacttcacttgataataccaaaccggaggagattgcatctgccatcaggcagcattggtctattgagaataatcttcattggcaactggatgttacctttcgagaagactacagtaaaaaggtgaaaaatgcagccagaaacttttcggtggcaacaaaaatggcacttaccatactaaagaatgagaaaacaacaaaaggaagcatgaatctgaaaagactaaaagcgggatgggatgaaaaatatttgtcacaacttttacaggaaaataatttttaatgcgtctgccctgctggagtgcaacgatacagatagtagtaggaaaaaatggcaatgattaaggaaaagcataaggatataaggtgcatgatacacaggaaagcagtaaacaataggaagttgcttaataaacgacataagaaaaaggaataatcgtaaagtccgacgagagtctgggaaaagatacagccataatgcatgagaaaggagtaaaatagataaaaggagtatgagaataagatgagaaacgattttaaacctatgagaaatgcatcatttttaaggataaatgatagaaatagtatgagaaataccattttatattttatttcccatactattatattattgatttacatataattaccgtattatttatgagaatatgagaaatgaaaatgaaaaatcgtttgcagggggcgcgctgatataaatgcaggaaactatcataccaatgtttttcaagaaaatgagaaatcggataagtccatatcatagatttatttagtacctttgccgtcctatttatataaaaagaaaaaatgagtaaagaatacacactcgcagatttcacagatattttcgattactccacaggctggttcagcgacagtagcatttgtagtctattctatcagatattcaaacgattcccttctatgaaaatggtgaaatataaagtaaaccaagatttcctgaaagaaatcaaaaaactttatcagcaagacgatgcgttcgatatattcgagcatatatattgcaatcattttgagaatgaaaaagaggaagaggaggaggaagaagatacatctacaaaagagttatacgattgcatcgttatctgcaagaagaatttaatgattggctattttgataattgcataaaaatagcctattccaatattgataaggaagaaatcgatcgcatcaatcagatttgcgaaaaccacaaaaaggagaatgagaaactgaacaacctatttatagtaacatacgctcataactacttcagcctgaaacaatcgcaaatcaataagccggccattcagattgaccgccactataacaatgattttgctcccgtagccgctgaaatcgaaaacttcctattagaggagaataaaagcggtttaatcattctgcacgggaaacaaggtacggggaaaacaacttatatccgtcatctcatcaatctcggaaaaaagagaatgatttatatgagcggcgacctggtagacaaactttcagaccctagctttatcacttttatccgtcaacaaaagaattcgatctttatcgtagaagactgcgaagagctattatcaagccgcaacggaggaaaccgcatgaatgccggactagtcaacatactgaatatcagcgacggactattaagcgatgaattatgtatcaaatttatctgcacattcaacgctccactaaaagatatcgacgaagccttgcttagaaaaggacgtctggctgcccggtacgaatttaaagacctgacaaccgacaaagtaaaccaactgataaaggaagaaggactggatatcccccaacagacacaacctatgacactggctgaaatctataattacgaaggcatggatttctctttaggaagaaagcgggtaggattctgaacaaatcctccaaagtagaacttttaaagaaaaatcgactattattattgcgaaatataagtatctatattttacctatcaacaagaacgattcgacatttttatacgtttattatacgttaaaagagttgccctattacggagcaactcttttaaatattaaacttcttaagttcaaactttgcatgtgataccttatatcgacattttcttacttacaagttaacggaaatccaaagatactcactcgcaaaatctgtaattatccaaagctaaaagggaaagtgctttcatcagataaagcaattaatccgttcttccgctggatacaaattttgttctctcttgctagccaaccggctgctaatgctgtactttctacgcttaggtttaatcttcttgccaattcaggtattgaaatttcaccaatttctttcagggcacaccaaacttttccggcattgttccctacaattgttttatccatggctatttttattaataatttggttacaatatagtcattttaataattgtttataacaaaactaacttttttgttttagtttttgacattatttaaaacaaagaaatcaatttcgcgtctagtgattaaaaacttggtaataattcgtaccataacaccactaaaaggaacattatatatcaaaataaattctcaaaacaggaatcgggcaatcacagaaagaaaataggaaattgacatttccgcaatatcggacaagtcatttcgcttttttaccaatacctttgcggagtgaaataccagaataagttatgcaacagaaaaaaacaacgaaagaagaatatcaaaagtgcgtaaatgttgtagtggaatacatcaaccaacatttgggagaagacattgatttaaaatctctggccagaatttcaaacttttctcctttttactttcaccggatcatgaaagcttttctcggtgaaccgattggtacgtttattgtccggacgcggacagaagctgccgcacgtctactccgctactcggatgttccgattgccgacatagcctatcggattggttactcttctccttcttcgttgtcgaaagtgttcaagcaattttatggcatttcacctttagagtatagaaacaataaaaactttgtaattatgaaaccagcgattatcaggccagacctggaactaaaaagagagatcagaaacgtttccgaacggaatgtgatttatatccgcctcaccggcgattacaaactgaatgattacggtggcacctggggccgtttattccaattcatcaaagaacaacagttgccgatgggagatttcagcccgctttgcatctatcacgatgatccgaaagtgacaccggcagaaaaactgcgtacagacgtatgtatggtaatgcctgtaaaggtagcccccaaaagtgatgtcggatttaaggtgatcccggccggacgttatgctatcttcttgtataaaggtccgtatgacaatttgcaagctgtgtatgatacgatttacggaaagtgtctgcctgaaatggaatgtacgctgcgggatgaagccagcgcggaacgttatctgaacaatccatgcgacactgctcccgaagagttgttgacggaaatttatattccggtagaataatgcggacagacaaatggcggaataaagagaatgaataaagatgtgatttaacgtctgacttttttggggggacagtgcaaaaccctgataagtctatcttttagacgcggatgacacggatttagcagatttgtaatcttcttatccgtgtcattttgcgttatccgcatctaaaagcatattatgctataacaggctgccttcctctctcctacctgttatttttcagcataaatgccaatccggtttccttcactatcagtgaatacggcaaaccatcctttgccgtccgcctcaatctttgttctgggaatgactactttccctcctttcagaagtactttttccaaggtctgttctatttcctcacagttgaaatggataagcactccatgcgtggaaggaagaaagtcgaaatttgaagcataagagatagcaccgacggtttcaccttcttctgtgaaacaagccattttttctgtttcacattcaaaagtcggaagttgcatacctaatactgtttcgtaaaaatcgacagcccgatggaaatcggaagcaggaatctcaaaaaatgcaattagttttttcatttcgtttcttttttatcgttactactaagcctttgcaaagacactgcaaaagtagggcaacacgaggaagcctgataggaaaaaagggacatctttaaagttcggaaaaataatcggaataaggagcacagacagaaagatactctgcaggggtgtaaccggaaaagagtttgaattcctttatcatgtgagactgatcggagaagccacattcataagctacttgtacaaaaggaatagtggcatcctgctgcaacattgacaatgcccgctgcatacggacaatacgaataaattctttgggggtagtgccgacataatcggcaaagatacgtccaaactgcttactgctcaaacaggccgtttccgacagatgagcaatgttgatttgcggctggaggtttatttcatgaaacacagcagacatccgcttgaggttatactccggaagggtgtataaacgacgaaggaaaaactgctctatcaaacgaatagaaacggcattatcagaagtgtcagtgacctgtttcaccaaatccgacagttctacatcttccatcgcatcggtatctacattttgtccgtgaaacagatggctgggaatatgaaacaatgctttaactgcataaggctggaaaacaacagtaatcatttcaatcctacccgtcgactgtacatccgaaaagccgaccgattgtccggaaataaaggattgaggttgtagttccgactcgcccgacaaaaggagttgtttccctttatgaaataccagttgcatacagccaatgggcagagtccgttcggaaaccggagtcactgaatcgtcttgcaatatccagtaatgccgtatataaggagcaagcgccaaacagggttttatgagttgaaatgattgcatagagcaaagatattatttcttaattcaaatgcaaaagtaaagctcctgtttaaagaggtatagtaaaaaaaggactttttataaattagggagtcgtcctattaagaacagatatgccggaatgataaacagataaggatttaaggcaggatccttatttgagaataaggtacaattgaaaagacggcaaaccttttcttaataaaaaaacatcctctgtttgaaagagcatgattgtagctcacattcaaacagaggaagattctttagataacggaaagtccgtattcgtaggcctccgatatcgcattatagtcctcgtcggaatagctacctttatctctggctttctgcatatctttcataaatgattctacggaagtcaggaagctataataattcttctgttcttcatcataacctgtgacagcaggaagtttctttgcagcttcgagttctttcttcagttcggccatcttcatatcaatacgcataccatccagcgcatgtttgcgtgaatagagattcatgatgctttgcacggtgccggacatcttacgcatggccatgatttgatctttcaacggttcatcggcaagcagttctttttcagcttgttctgtcagagggcttagaatatcaaagatcacttgtttatattccgacatttctacactaagccgatagttctcgtcgaggagcttgccgatctttgcagtctctttttcctgcttgtaagagaggaatttattaaaattatcatagaattgcgtccttgcactgaaaagtcctcgataactctgcttcagattctgacggacttctatattaaaataatctcccggatccatcaattccgctgtatctctggcagatacttcaggtggtgcaatcggagatacttcaggaacttttcctgtctgttccatatatcccaaaactgcatttatgtctttcgcattggctacatgcctcaacacgataagcgatgtatgataatagtttatcaccttactggcattgtccaattcctccgaagcgacagaggacgcagcctgtttcttgtttcctcccgaacaagaaaccaacaagagagcacctacaagtgctccgaaaaataaaatattcttcttcataatggttcgtttattaagtctttcgtactataacaataaaaatcgttttttgttatagacaaacaatgcatattcgagaagtgtagtggagaaatttaaaatgctgctaacgatgattaaggaataagcaaccaacgtgtataaaaacaaaaaatggctactcatcacgagcaaccaatcttttgttaaccttaaatctaatacttatgaaaaaaacacagtacaaaggtaccatatttcagataaatagcaaatttcagcgcctaaacagacgatattgtaacagggtttaatactccgagaatcgcattaacatttcagacttcatccgttaacatttaacatattcattcacataagttgctccccggataagtaagaatagaaaaaaaggctaatcatggaaacgacattgttttttttcgtaactttgaactatgataatcagtgccagccgccggacagatattccggcattctattctcaatggtttttcaaccggataaaagaaggatatgtattagtgcccaatccttatcatccgaaaatgattagcaggatttccttatctcctgctgtggttgattgtttcgtattctggaccaagaacccggccccgatgcttaaccagctggataaattacaggattacaactattacttccaatttacactcaacccttacggagaaaaattggagaatcgtttgccatctatcgataaacgaattgatacctttaaaaagctggcagacaaaattggcagagaaaaaatgatttggagatatgatccgatactgacgaatgaggaatacaacgtttctttccaccaggaagcattcgcccggattgcccatgaactcaaagaccatacctcgaaatgtatgttgggatttatagatcattacccccatatccgaaactcgatacaaccattcaacatcaatccgctgaccaaagaggaaatagaagaaatggccgtctcctttaaaaagacaatagatatttatcccggtatacagctggacacttgtaccgtcaaggtagatttaagacatttgggtattcccagcggcttgtgcattgataaagggctgattgaaaagatcaccggttatcctatccttgctcaaaaggataaaaaccagcgtaatatctgcaactgtatcgaaagtattgatatcgggacttatgaaagttgtctgaacggatgtgtttattgctatgccatcaaaggtaattataatacagcagcatataatatgaagaaacatgataaaaactcgccgttgctcatcggtcatttatccgaagatgatatagtaaaggaacgggagatgaagagtctgcgagataaccaatattcgttgttttaatcttcctgatccgcatctgacttacaggcataaaaaaaggctatctatcccagacagccaatcttttgttaaccttaaatctaatactatgaaaaacacagtacaaagatacggacttttcggttatctccaaattttcggcccgatgcagcgtatcttataacatggtttaacagaatctgaaccgcattaacaaataagccgccggacattaacatttaacagttttcttaaataatcaaggcataaaaccggaggagatgcaaatgttttccaatcggacaccttatcttattaaagagcgtttatgaggtctaacaaattcctctgccatctgtttctaatagaaggtaaccatcaaattcacaatatatgaacagattcgaaaataaagtagttgtcatcaccggtgctgccggtggtatcggcgaagcaaccacacgccgcattgtctccgaagggggcaaagtagtcatcgctgaccattctgaaaaaaaggcggaacagcttgccaacgaacttactcatgcaggggccgacgtgcgccatgtttatttctccgccaccgaactccagagttgcaaagagctgattgatttttctatgaatgaatatcaacgaatagatgtactgattaataatgtaggaggaaccgatcccaaacgtgaccttaacatcgagaagctggatatcaattactttgacgaggcattccacctgaatctctgctgcactatgtacctttctcaacaggtcatccctatcatgactaccaatggcggcggaaacattgtcaacgtagcttccataagcggacttactgctgatgctaacggtacattatatggtgccagcaaagcgggcgtcatcaacctgacgaaatacatcgctacccaaatgggaaagaaaaatatccgctgcaatgccgtagccccgggattggtacttacccccgcggcattggataacctgaatgaagatgtacgcaacatctttctcggccaatgtgccactccttatttaggagaaccggaagacgtcgcagctgccatcgcttttctggcttcgaacgatgcaaggtacatcacgggacaaacaatcgtcgtagatggtggcctgactgctcataacccgacagtagcgttatcatagaacataactttaatacaatgaataaaatgacaataatgggaatatggcttctttcgctatttatcaatagcggatgcaaccgggaattagtagaatagacagtaatgatcttaaaatatctatcaaaaagggggaagagtggatgcatgattttccattgtttctgggtttcacaatgactttacccatgcattcatttcgttaatagcttctagtgaagacggaagctcctgcttagtctgcaaagcatcaggacgaagatcgacgcgcacatacccccagccgtcttcgtcgatttgcagatagccacacttcctgtactcttccaggcaactgtcagagcatcctccataaaagtcacattgaagttcatcttccgacgtttttttattggcaatgaatgaactttcacccacccagacaaaatcgtccaaatcaacctcaaaataatcccctcctccccgattgagtgcggcaacttccgccaaacgtccttcgggaagcatcttgtaaacgcggacataacattcttccttatacggattttcatctacgacaaggaaaagaccggattttccacagaataaaggggtatctatactacgatattcgtaaacttctcctgtaacatcactcatcacaaaatagccccagctctcaaaccctgaatagtgaaaaaaatgcagaccgtaatcagactgatacccatcatagtaccattttataaatccatcttcatcttctttcgccggagaattcagcagtgcgagttccccctttttccagcgcacggacagtttattctgattgtctgtataacgccctttaccagaatcaagctgtttattacaactatccgccttcatattcgtatattcagcaaattcaagttttttcacgtctgcccctgtattgctatacatacgcaaggagatcattcttccactatgatagtcatacatactcttttcaatccggttgccttcttcagaataaatttcagtcatgacacccggcacgcctttctccgagtacggataactctcgaaacgacgtagccgcccgccagaataattccttatatccagccgcttttgagttccgaccgtcacaatgcttcgttttacagaatcacacttatcatccatgaagtatatcggctcatcggaatccttttcaaaatattttcgtttcagaagatactttttgccgttctccaatgcataaatttcttgaatgtaataaaagggagtcccttctgatgcctgatatttatactcataccagtcgggagcctccgctaccccgtcagggtcattataagcgtattccgaatggctataataccaacattcggtcggtaacacttcctgatcgtcaatataatgattaacctgccatagatgtccgttggcatgccatctcatttcctctccgtttagcttcccatctttatagtgttcaaaccagtccggctttccatcataataccatctctgacgtactccattaagtttacctcgtgtagcctggtaaaagatatggggatatccgttggaataataagattgataaagttcacaaatactgtcaagagtgattatacgacttgtcatacaatgggaagagatactgtaatgacgcaccgtatcgttctttattccgtctttataaacaactaccgaataatagggttccgacacaaaagaatcagtcgagcgaaaataaaagtgcttataagcaccgttcatcaatgagtccttgtaaaaacaacgttccacgccatctacttgtttccggcaaatactgtcggagtcatagaccttcaaagaagatgcttccggttcttttagcaatgattcggaaagcgtatcaggaataatccaatcacttcctttataaaaatccatagagaaagcttcggaaatagcagtagttttttcgcttaaagcgttttcctgtgtttcctgattcgtggaagaagattgcgaagttcctccggtttttccgccacatgataacaacagtaatacgcagctatataccaaagcgtttttcataccaaatatcttttatttaatacataattacggcaaaattaatgataatatcagataatcaggtataaatcgatcccaaaaatggaataattatctgtcagcaggctattatttcgttcaacaaatactaactttacaacgttattaatagaaaagaacgaacgtcatgattgttaaaacactactagatacagacctctataagtttaccacctcgtacgcttatatcaaactgttcccctatgcaatgggtacttttagtttcaatgaccggaacgaaacaaagtataccgaagcttttctggaaacactcaaggcagagatcaagaatcttagtcagttgagattcacggaagaggagttggaatacatgacgaagaattgcagatttctcccgagagtctactgggagtggttgtcttcttttcgtttcgacccgaataagattgatattcatctggatgaagcctgtcatctccacatcgaagtgactgacttgctttataaagtgactttatatgaagtgcctttgctcgctattgtttctgaaatcaaaaaccggttcttcggccatgtagcagacatgaacgggattctttgcaaactgtcggagaaaatagagttatcgaaccaacatcagctccgcttttcagaatttggtacacggagaagattctctattgatgtgcaggaaactgttatcaaaagactgaacgagacagcgcaatattgcaccgggacttccaactgcaacttcgcaatgaaatatggaatgaaaatgatggggactcaccctcacgaatggtttatgtttcatggagcacagttcggatataaacatgccaattatatggcactcgaaaactgggtgaatgtttatgacggtgatttgggtatcgcactttccgatacctatacttccggcatcttccttagtaaccttagccgtaaacaagctaaacttttcgacggtgtgcgctgcgattccggtaatgaatttgagtttatcgaccgactggttgcccgctacaaagagttgggaatcgacgcgacaaccaaaaccatcgtattcagcaatgccctcgactttacaaaagcattagacattcaagaatactgcaaaaacaaaatccgctgctctttcggaatcggcaccaatctcaccaacgataccgggttcgaaccttcgaacatcgtgatgaaactgacgcaatgcaagatgaatgtcaatcaggagtggagggaatgtatcaaactgtcggatgatgaaggaaaacataccggcagtcttgaagaagtgcaggcatgcctgcatgagttgaggttgaactaaattataacaatgtggcacatattttccgtaagttctccaaatgcgctataacattcttatcttttcgggcaatctgcatattatatcttgtctgcatattcatcagcatttccgcatttatattggtagcagcttcaatcaataaggcaaaatccgtagatacaggacgacgcccattcaatatatcattcaacatcgtataagacacgcctaccacttccgcaaatcgtttctgcgatataccacgagattgtaattcttcttttataatctctcccggatgcaccggaataaaagaataccctaagttagacatactattcttatttataatgatttgttatgtcaataatagaacaaatagttatgattggttcagagtccgtagtcgatattttaaattccagtcgatattgtttatcaatccgaatagaggaaatatcttttttactccctgtcaatacttcataattcaacgaatttaaaggataaagcgcttctacattcaatgcttcagccaaagtgacaattcgcttcacataattccttattacttgaggttgaaaacgatgcttcttatcgttacatttaccttcataataaagttctgaaagatactccttttcaaactcaataaccatttctctaattattacgacagtacaaagatagtagtttttccaagaatacactaaaaaagtggatataatgatagcagttctatcaaacttagttaaaaccaagaagtattagataaaaactgctatcaccttattaaaataactgtatccaagcagcacagtatacatgtgctttctttatactatctgtgacaaaagtgacaaaatccatatccgtggagttagattaaaatctttttcagaatttgaatcctttcactgctttttccaatctttccaaaggtaattcgccggattgccgccaaagctgttgcccttttctaaaaagaataaaggtaggagtcgactccaccgtataaaaatcagtaagggcaggctcctggtcgatgtccacttccaccacttccaatgttcctaccatcagtttcttgaactcttcaacaaccggtttcatgcgctggcagtgaggacaccacgttgcgtaaaactctgccattacccaatcaccgttagctagcttctcctggtttctttcttcacgagctattttcttttctttcataatgaatatctccttttaattaataactatcaacctaacaatatcaggagaaagatggtttagaaaagaagcaaggttacacacaaattaaagaatcaaacccgtttgcatttacccgaccagctattaatatccaagcaaatcatctccgtacgatgaaaagacttctccgcatcatactttgctcctatcactttatcttccggactaaggacaagcattgcacaaaattgaaactttcgtgcaaaaaaggaacatcctattcaatatttatttatctttgccccccgaaatggttcagaatccgtatccaacggacgatgattaatagggaaccgggtgtaaatcccggacagtcccgctgctgtgaaactctgttcaatgtcttataattgaactaatttaacgccactgatgttattcgggaaggcaaataagacaagagtcagtcagaagacctgccattttgtgtaagacgcccctctcctcgtggattaggagaaagagtatcacttgttaagccccaaatcaaaaaaatactgtttttcgtcgggtggagtatatccattagacgggaagacattaataagtatgtacttaattgaaaaaagtatgataaaaaaaatcttagtagccaatcgcggtgaaattgccgtaagggtgatgcgttcctgccgggaaatggagataacgagtatcgctatcttctccgaagcagaccggaccgcgaagcacgtgctttatgcagacgaagcttattgcgtagggccggcagcatccaaagagagttatctgaatatagaaaaaatcatcgaagtggcaaaagcagctcatgcagacgccattcatccgggttacggcttcttgtccgagaatgccaccttcgcccgtcgatgtcaggaagaaggaatcatctttatcggacccaatccggaaacaatggaagctatgggagataaaattgctgcccgtatcaaaatgattgaggcgggagtacccgtagttcccggcacacaagacaacctgaaaagcgtagaagaagccatagagctttgcaataaaatcggctatccagtgatgctgaaagcttctatgggcggtggtggaaaaggtatgcgcctcatccacagtgccgaagaagtggaagaagcttataccactgccaagagcgaatcattgtcttcctttggcgacgacacggtttacctggagaagttcgttgaagagcctcatcacatcgagttccagattcttggtgacaagcatggaaacgtcattcatctgtgcgaacgcgaatgttccgtgcaacgccgtaaccagaaaatcgtggaagagactccttcggttttcgtcactcccgaactgcgaaaagacatgggtgaaaaagcggtagcggcggctaaagctgtgaactacatcggtgcgggtactatcgaattccttgttgataaacaccgcaactattatttccttgagatgaacacccgcttgcaggtggaacatccgattacggaagaagtgatcggagtagatttggtgaaagagcaaattaaagttgccgacggacaagtgcttcaactgaaacaagagaatatccagcaacgcgggcacgctatcgaatgtcgtatctgtgccgaagacactgaaatgaatttcatgccaagtccgggtatcatcaaacagattacagagccgaacagtatcggtgtgcgtattgacagttatgtatacgaaggatatgaaattccgatctactatgacccgatgatcggtaaactgattgtatgggctaccaatcgcgaatatgcgattgagcggatgcgtcgtgttctccacgaatataaattgaccggagtgaaaaacaacatcagttatctgcgtgccatcatggatactcctgattttgtagaaggtcattatgacacaggattcatcgccaagaacagcgagtttctgcaacaacggattacgcgcaccagcgaatattccgaaaatattgccctgatcgctgcttatatagactatttgatgaatctcgaagagaacaacagcggtatggctgccgacaaccgccctatcagcaagtggaaagagttcggattgcataagggtgtgttgagaatctaaattttaacaaagagaattcaattatggaaattcatataggaaaccgtgtggccgaagtagaactggtcagcaaggaagataacaaggtagtgctcaccattgatggaaaaacgtttgaagcagacgtagtgatggcagaaaacggtacttgcaacatcttgatggacggacgcagttcgaacgcacagctgattcgccgtgataacggaaaaagctataaagtgaatacgcattatagcagtttcaatgtagaaatagtggacagccaagcaaaatatctgcgtatgcgcaagaaaggggaagaagaacagaatgactgtatcatttctccgatgccgggcaaagtagtgaaaatacctgttgcagtcggccaggaaatgaaggcgggagacaccgctatcgttatcgaagccatgaaaatgcagagtaactacaaagtgacttcagactgccgcattaaagaaattctggttcaagaaggtgatagcataaccggcgaacagacattaataacattagaaccgattgcataataataagaacggattgcattatggaagaaataaataaagcatacgccacgttcgaggaacgtgaccgcatcgcttctcttggtggaggcgttgataaaatagagaagcaacatgaaagcggtaaaatgactgctcgcgaacgtatcgagatgttactcgataagggtactttcgttgaactggataagttgatggttcaccgttgtacgaactacggtatggataagaacaaaattccgggagatggtatcgtatccggttacggaaaggtggacggtcgccaggtgtttgtttacgcttatgactttacggtatatggcggctcactgtcagcttccaatgctaaaaagattgtgaaagtacaacaacttgcattgaagaacggtgccccgattatcgctttgaatgattcgggcggtgcacgtatccaggaagggatcgagagcctttccggttatgctgatattttctatcagaatacaatggccagcggtgtgattccacagatttcggcaatcctgggtccttgcgccggaggtgcctgctactctcctgccctgaccgatttcatctttatggtgaaagaaaaaagtcacatgtttgtgactggtccggatgtagtaaaagctgtgattcatgaggaagtaagtaaagaagagctgggtggcgcaatgacacatagtagcaagagcggtgtgactcactttatgtgcaataccgaagaagaattgctgatgagcatccgtgaactgctttctttcttaccgcagaataatatggatgaagctaagaaaaaaccttgcactgacgaaacaaaccgcgaagatacttctctggatacaatcgttccggtagacccgaacgtaccgtatgacatgaaagacattatcgaacgtgttatagacaacggctatttcttcgaagtgatgccgaactttgctaagaatattatcattggctttgcccgtatggcaggtcgttcggtaggtatcgtagcgaatcagccagcttatcttgccggtgttctcgatattgatgccagcgacaaagcaagccgttttatccgtttctgcgattgcttcaatattccattgattacattcgaagatgttccgggattccttccgggatatacgcaggaaaacaatggtatcatccgtcacggtgcaaaaatagtttatgcatttgcagaagccactgttcccaaactgacagtgattacccgcaaagcttacggtggtgcttatatcgtaatgaactccaagcagaccggagctgacgtgaacttcgcttacccaagtgcagaaattgctgtgatgggtgcggacggcgccatcaatatcctgttccgcaaagctgacgaagcaacaaaggccaaggaactggaagcctacaaagaaaagtttgccactccgtatcaggctgctgagctgggatatattgacgaaatcatttatccgagacagactcgcaaacgtctgattcaggcactggaaatgacggaaaacaagatgcagacaaacccgcccaagaagcatggtaatatgcctttataacaactagataaggtgcgcaaaagcaccactcataaaacgagcttgcagagattctatgatatactttaggagatttgtaagctcgtttcttatttgtaagcctgccgtttctttatatgtgacaaaaaaaacggcacctcgattcacatcgcagcaccgtcacaacacaaacacaaaataaaacacgacaaaactactatgcaatcttcctgtcatgccggggaggcataccttgcttgacttatctatattcgcatacacacaagaagctttatcaggcgatttgcacaataaataacatacatttccggattttgttcacaggattgataagattttattcaataatatgataagaaaatgaaatagcacgccctttaaggaattcaagagaaacgaaaaaacggtaccccgattcacatcgcagcaccgtcacaacacaaacacaaaataaaacacgacaaaactactatgcaatcttcctgttatgccggggaggcatattcactagcctatatatattcgcatacctacaagtagccatcaggcgatttgcatatataaaacattcagatttttattttgttcacgaaaggagaagtaaaaatgttatttcttctccttatagtctttcaggaagccttccatcagccatttggcgagtgcctgacgattggaattcatcaccaaccgacgctgatcgaacgtattctggatattacccaactccacaaagacggaagcgggagtggtatgggaaagtacgtataagttacgcccgcttactgtgccggaaaagccccggttgggttgatgcttatcatattttgactcaaacgtatctttcatattatttgccaatcgtttgctttctccctttttattcgaataatagaaaaagacatctgtttgttttcccttactacggctatcaatatgaataaaaatcgccctgcaataagagtagttcttacggtctttccggtaaagagcgtttattttatcacagcgttgctgtaagcgttgcacctgattcaaaggaattggatcacccatacaagtctcccgtttactgtttgacaggtacgaatcatcacggataccatctttagcatcttgaatgataatacggacttcggccccttcctgcatcaggttacgtgccagacggagagcaatatcataagcgtattcatcttcgtgcagttcgtatttaccaactttcccgatagcacccggatcaggacctccatgtccgctgaccacatagaagcaagcaccggcaagacggttggaagtgactttcacatcagccagttgttttccaaacagaggctgattgagggtagttcctatttttgttgatttagctttcggagattgttgctttgtcccggtatttccggaaggtgatttcttgatgggaggaataacatacgtcacgcccactttaagcacattgttctttcccagtttctgtttattcagctcaataaagtcgtcgtaatacttcttcggagagcggttgtgccttaatagaaaagaagagataccttcacccgccttcggggttgccttctgctgtgcccaaagagttgtgcccgaaaaaagaaaagctaagaataaaagaatatagagtttatttttcataactacattaactatctccttcgcaagagtatcatttcactcataaacagggcaaaaatacaattattttccctacttttgcagcattaaaacattttttgaaataaaacattaaaacccgataacattatggcaaaacaattcaaaccggaaaccctgtgtgtacaggcaggatggacgcctaaaaaaggcgaaccacgcgtattgcccatctatcaaagtacaactttcaaatacgataccagcgagcagatggcccgcctgttcgacctggaagacagtggttacttttatacccgcctgcaaaatccaacgaatgacgctgttgccgccaaaatcgctacccttgaaggtggtgtagccgctatgctgacttccagcggccaggctgccaacttctatgccatttttaatatctgtcaggcaggagatcactttgtttgctcttccgctatttacggaggtacgttcaacctgtttggcgtgaccatgaagaagctaggcatcgatgtgactttcgttaatccggatgccagcgaagaagaaatttctgcagctttcaaaccgaatacaaaagctttattcggtgaaacgatttccaacccttctcttgaagtactggatattgagaaatttgcacgcattgcacacagtcacggggttcccttgattgttgacaacactttcccgaccccgatcaactgccgcccatttgaatggggagctgacatcgtggttcattctactaccaaatacatggacggacacgctacaagcgtaggtggctgtatcgtagacagcggtaattttgactgggatgctcatgctgaaaaattcccgggactttgtactccggacgagtcataccacggactgacttataccaaagcattcggcaaaggtgcttatatcaccaaagcaactgcccaactgatgcgtgacctcggcagcatccaaagcccgcaaaattctttcttattgaatctgggacttgaaacgttgcacctgcgtatgcctcaacactgccgcaacgcgcagaaagtagccgaatatctttctaaaaatgagaaagttgcctgggtaaactattgcggactgccggacaataaatattatagccttgcacagaaatatatgccgaatggttcctgcggagtcatctccttcggactgaaaggcggacgtgacgtatctatcaagtttatggattcactggaattcattgcgatcgttactcacgtggcggatgcacgtagttgcgtgctccatccggcgagccatactcaccgccagttgacggatgagcaactgatggaagcaggtgtacgcccggacttgatccgtctatcggtaggtatcgaaaatgcggatgatattattgctgatatcgaacaggcattgaacgcataagaataccgtaaaggtataaaataataagagaaggcacgggaatgaaatatttcccgtgacttcttattttccacaaaaagaaagttaatttcgcaaagaatcatttcaaatatgaaccgataaatcttctcggatgtttatctttgcagggaaccaaattctgtacagatatgaaaaagaatctattattagcattcgtattatgcttttcttacggattttcttattcccattcatttaacaacccaactaacctgactacaaagatgcaaaactttgaaatggattcatttaccacccaaaatgggaaaagcctgaagatcactttcttcagacatgcgagcttattgctggaatatgcaggacaaaaaatattcgttgatccagtatccgattacgccgactatacacaacagccgaaggcggatttcatcctgattacgcatgaacatggagaccatttcgataccaaagcaatagcagctatcgaaacaagcgggactagaattattgctaatcctaattgccggaaaatgctgaacagaggacaggaaatgaagaacagtgatgtgcttcaactggcagatgatatgaaactggaagccgtaccggcctataatacgactcccggcagagataagttccatcccaaaggacgtgacaacggctatattcttactctgggagggacccgcatctatatcgccggagatacagaagatattccagaactaaaccaaatgaaagatattgatatcgctttcctgccagtcaaccaaccctacaccatgacaccggaacaagcgatacgtgcaactcaaattatcaagccgcacattttgtatccttatcattacggagatacggatatcaataaagtaaaagaaggattgaaaaatgagaaaacaaccgaagtacgtatacgggctttacaataaagcccgtacaaatgattacaaatcctccgcagataaattgaagatcattgtatccacccaatatacaaccgttctatctgcaggtaaaacatcttcgagataaggtgaatcagatacatcttccaaccatgccgtagtaatcggacctctttctcttgtaagactttgagttcctaaatacgggctaaaattaaagaaggtgtgttgtttctctacatcattttcacctttatatgtaaagacacttcccatccattaagatacaggactgtagaagaaatcgtgttcgtacaggttcccgtttcgtcgattaattcggaaccgctaaataaaataatctctgcatcatcttgacaggctgatatacaaaaagtcatgagagagaggagaaagaagcctaataaagtttttgttttcatattttcagtggtatggttaaatcgcgatttatgtcattgttttacaaagatataaagtatttgtatagtatcatcatacaaatatgatgaattatgttttctttatatacacccgatgtgttcctctaccatcaatcccgataccggaaccgggcgtatacgcccattggcgcaattcattggtagccgccgtgcgcagcagacctgtcagtttccggtattcgtagaccgtcagaaaaggatgttcctccagatatctaacagccaatgctagtcgttgctccggtgtatacttctgtgaagagcgttgcgacttccacggagctctttccagcagacatcttccgttgatacgcctcaccatcttcctgtctacacgaaagttcacgctccccaccacaatgcttcgtgcgttacgatgggtttcaccctctccggtcttttcgcgttctttatctttgcataacgccaacgaaggagagaatgttccgataccatccagcttcacagacttgccttctgccatctgatgtgccatttcaataccgatctgtgtaattacgccttccacatctccgacattaaaaccactgctggatgctatctgacgtattaaatcctcggtagatacctgatctatcattgcaaaccgaggataaagtacctgttcgcccgttccatgaatatcgggcatttcttccattacgtacattgccataatactaaagtttatttgaaatattgattattaatagaaaacttactcgctataggtagaaaacttgttctcccctacaggaaaagttgtttttcctataggacaaactaaaaccgcaagttctggttttataactgaaacttctgattacataatcaaaagttccggttttataatcagaacttgcggttatagttttcttaccaacaaagatacgttttcctgccgggataagcaagtttaatccctatgaaaaagaagtttgattacaattcagttacttattaccgcttctttactttatatcctttcagggtaaaaccaacttcaaacaggttcaaaagggctatccggatgttatcttctatataggtctccatattatcatattttgcaaagttgacgggaaggagtctgttattcctcctaaagctttcatccggtattttacccgtaaaacgtcctttcttcttcactccccaacgaatggttttactacaaggaagaggtatacctatcgtcagcactttttctttagttaccgtatcggtgattccatgtttccagatactgatatggttggctcccaaataagtgccgatataaaggacaacggtcagcgtccaatcgtccaaagcctcatcggtttgaataccattcaccaaatcagagaaatagccttcaaccatttctctgtcaaaacagtttagttcaggccattcacatttctcaaacagttgatgcacattgacaggaaccagtaaggtggttatttctaactgatatttcattcatttcgtttttatatcattgcatctaaaatcgtctcaagtatcttatcgactataaatatacaattttaccagatcaaatactaaagaatagagcttttttaaacctatttctgaaaaagaaaggactgtttgatacaccccctcctatgtaaacagggtttatcagacagtcctttccgtgcggagtatgattcgtccgttattcagtggacgatccttgcttttcgtccttacggcatttcagtttctatctggaatttacggcttactttcatcaaattgatggtataagtgactacgttctgtgcttcctgaaccatcgtgagatacaccatgctcacccggatgcttcctgattggctttggatgcgttgcagttccttacgtttcaatagtgaaagctgtccgttgaggtcgttggcacgacggatttcttcttcgaagtcgttgtactcgttgttttccattttcttacgacactgctgaatcagataggtgatatcttcggatacatcgctgaattcacctttctggatggcgtccaatgggttgaagttgttgtcgatatgttcgaggcaaggttcgcagaggcgggaaatactgtagaccaattcgctggcgaagtcgttgccttgatagtaataaagtcctttttcgagtacggtgttattgtcgagacgacacatggcgacggtgcccgaacgtttcatctgtttgatgagctgtttctcaaatttagtggaccccatggcacgacgcaatcctcgcagattttcatgaaggaatgaagtgacagtcagttcgaaatttgtttctgcatattccaatactttggaaagttcttcgcgggtgtgcttacgcatcagttgcaaggcttctgtgctgtctgtggtttgcatcagttgcttcagcgtttcgttaccttgttctttcgctttgcgtttcttgtacatcacctggctacggatcaagatgaatacagctataccgatgagggcgatgatagagatgttacctccataatggagtacgagagctacgaagaaacagatggtgaaggcggctccggcggtgatgaaccagcctccgatgacgcttaatacgccggtgatacggtaaacggctgaatcacgtccccaggcgcggtcggccaaagaagtacccatagctaccatgaaggttacgtaggtggtggaaaggggaagtttcagggaggttcccaaggcgatgagcagaccggccaataccaggttgacagaagcgcggacaaggtcgaaagcagctccgtcggcaatgattgcttcgtctttgcggaagcgggagtcaagccattttttgctgccgtccggcattattcgggagattccattggcaagtgtcatgctgatgcggactactgtgcgggcgatcggagtacttccgaatgcttcttctccttcatcttggcgggaaaggtcgacagatgttttaattacagcatgtgcttttttagaggtgcagagggcgtagaccatgacggctccggctccgataagaaaataccacggtgttttagcaggtcccagcaaggaggtcatcaggaagccgttcggatttccttctccgttggcggtgtaatctaaaaaagaggagaaacctgcgaggggaacgccaataaagttgacaaggtcgttaccggcaaaagcgagagccagagcgaaggttcccatcagtacgacgactttgaaaacattgattttcatccagtgaaggatttgcatcagtacggtgaagaatacaaagaaaacggtgattagcatcagtgtgttgtcttgtatccagtgtttgttttcagaggtcatgaaggagctgtctttcagtcctttgataagcatgaaatagatgatagcggtagcggctacacctccgaagagggcaatgctgtatttcatctttttcgtatagttgaaagtgaatatcacacgggcaagccattgtacaagcattccgaagaagaaggcgatagcgacggagacgaagatcgccatgatgacggagagggctttgtcggtgtttatgaggtcgcccagaccgagggtatcgctattatgtactttgataagtgagagggcaaaggtacctccgagtagttcaaagactagtgaaacggtggtagaggtgggcatccccatggagttgaatacgtccagcagtactacgtcggtcaacatgacggccagcagaatgcacatgatttcggcaaagtagaagtgctcgggctggtagatgccgtgccgggcaatgtccatcataccgttggacagggaagcgccaatgaatataccaataccggctatgaaaagaatggttttaaacgaagcggccttggcgcctaccgcagagttcaaaaagttaactgcatcattactgactccgactatcagatcgaaaacagctagtacaaagaggaagatgataatgcataaataaatagtctccataataaatatatgtgtatgttgtttccggctgcaaaggacgggatttgacgttgcagggaggtgtcatacatgttacatttatgttacaatcgtctttcttttgtctcgtaatcgtctttcttttgtcttgaaacaaaagaaagaagcaaagaaaaattcaaggctgacttttttctcctactcgctccctgcactgcgctaaagggcagaaactcgctacgctcaaacagtctgccctttttgacgctccgttacgggggctcgcttgacggagaaaaaagtaggccggaggggcgtgcggggtgggcgttgtgggggaggttgcatgagatgtcggtgtggttgttgcgagggaagccatgtagtaagggcgtataacgggggatgtgcagcgggaacgttgcgggaaggccgtgtggggcgttgtaagttgcaggacacgggtatgggattcttatgttagttaattagttggttgttttttagttatttgttttgtttaaccagtcatagaaggtgtattgggctcgtacagcgggggtgccgggcgctctttttttgaatatatttcgcaggttgtcgtctacccagcaggctttttggttgtcggcgagctggatattaagcatttcgatgaggctgtcacgcaggtcgggggcgagaatgggggtgatggcttcgatgcggcggtagaggttacgacgcatccagtcgggggagcccatgaagactttgggtttgccgtcgttgccgaagtaccagatgcgggcgtgttcgaggaaactgtctacaatacgggtgacacgaatgttacgactgtatgactgtccggggataagacaacagattccacggacgatgaggtctatttgtacgccgtgttcggaggcttcgtagagacggtcaatcatggcggggtcttggagggcgttcatttttaggatgatacggccttgtttgccttcgtcggcgagggcgatttcccgatcaatcaggcggttcaattcggggatgaggttgaaacgggcgacaagaagggtggtgaacttcgggtcttctttgccttgcagggtgcggaagaggttatagaggtcggccactatcttcggacggcaggtgaaaaggccacagtcggcgtagagggtggcggtcttttcattaaagttaccggtgctgatataggcgtagctgggtattttttcaccgttcagtccgcggcggcggataagggctactttggcgtgtactttcagaccgggtatgctgtatattattttaatgccggcggcttgcatcatttcggccgtggcaaggttgttttcttcgtcgaaacgggctttcagttccacgaatacggtgactttcttgccgttttgggcggcggctatcagggtgttgatgacggcggagttttcagctacgcggtattgggttaccatgatttcacgggtttccgggttgtgcacggcttcatacaggaagtggatgaagtgctcgaaagagtgataagggtaatataataacaggtccttcttggcaacgtagttgaagatagattctttttcgtcaaggatggtcagcttcattggcttcggcttttcgaggctgtgaagagatttgttcgggttgggaagatgacgcaggtcttcaagattcaggtgcttgtcgccggggacaagttcatcacgctgaatatggaaggcgtctaccagaaagtccagaaagtcatgaggcataccacggtcgtagacgaaacggcagacgtcaccgatcttacgtttcttcactttcttcttgagttgagcgacaaggtcggcactgctggcggtgtcgtcaatcaatatgtcagcgtcacgggagattttgatgcagtagctggaatcaacatcgtagccggggaaaataaggttgaggtttgccttgattatatcttcggtaaacatcaggtaatggtttttctcgcgggatggaagttcgatgaagcggggcactttggcgtagggttgcttcatcacgaagtaaagaggttgccgggattctgttagactggtagttccttcatttccttctttcttcggatagactcgtatggccaggtaaaggcggttatcccgcaggaaggagactattttatctttggatacaggcacaggctgcaggtagggaaaaatttcttcccggaaaaagtctttaataaactgctggtggaacggttctacatgtctgtcctgataaaagatgatgtgattcttgcgcagggcaggtagtagtttctcttcataaatgcgtacacggtcatccagctggcgggtgacttctttatttatttcttctaccagttcgcgggcggattgtacggtttcttcatcactttccgtagcgccggaggcaacagctttatggtcggctacacggattttgtaaaactcttcgaggttggaagagtagatagagatgaagttgatacgttcgtagagcggtagacgctcgtccagagcctccaacaatacgcgataattaaatgagagccaactaatatctcgcttgaaataattatatttgctttccatgtgctttaagatttttccaaatatagtatctttgtgggattaaacaaagaaatttatgacaagaattggattattatctgatactcacgcttactgggacgagaaatatctggaatattttgaaccatgtgacgaaatctggcatgccggagacatcggttcgctggaagtagcggaaaggttagccgccttccgtccattccgggcggtatatggaaatattgacggacaggaaatcagaaagctgtatccgcaaataaaccgtttcacggtagatggtgcagaagtgctgattaaacatatcggcggttatccggggaaatacgatccttccatcatcggcagtctgatgacacgtccgcccaaactttttatcagcggacattctcatatattaaaggtgaaatatgataaaacgctggatatgttgcatattaatccgggagctgccggcatgtccggtttccacaaagtacggactttggtacgttttgttatcaaccagggggcctttcaggacttggaagtcatcgaattggcggacaaataaaataaatgttcctgccagattgaaaaattattttaaaattttgccacgtcggaattctttccgacctttgcacgcagttaatgaataactcagacgaacatgaaaggaattattctagccggtggtagtgccacccgactttatccgctctctaaagcgatttccaaacaaatcatgcctgtgtatgacaagccgatgatttattatccgttgtcaacacttatgttggcaggaatacgcgaagtgttgattatttcgactccacgcgatttgccgatgttccgcgacttgttgggaacgggtgaggaactgggtatgtctttctcctataaaattcaggaacaacctaacggactggcacaagctttcgtattgggagccgatttcctgaacggcgaaccgggctgtctgattcttggggataatatgttttacggacagggcttttccgccatgctccgccgggctgccaatatagaaaagggcgcctgcatcttcggctactacgtgaaagacccgcgcgcttatggtgtagtggaatttgacgaacagggaaaagtgatttcactggaagaaaagccggaagtgccaaaaagtaattatgccgttccgggactttatttctacgatgccagtgtgacggaaaaagcagcggctcttcgtccttcagcacgtggagagtatgagataacagacttgaaccgtctgtatctggaagaaggtacattgaaagtggaactcttcggacgcggatttgcatggctcgatacgggtaactgcgacagtctgctggaagcttccaacttcgtggccactattcagaaccgccaaggtttttacgtcagctgtattgaagaaatcgcctggcgtcagggatggattccgacggagcagttgcttctactgggtcaacagctcgaaaaaaccgagtatggtaagtaccttatcgaattggctaaacaatcctaaaatcaacataaagaataaaatatgaaaacttatctagtgaccggtgccgcaggatttatcggggcaaattacatcaagtacatcttagccaaacataacgacatcaaagtcgtgatattggacgctttgacgtatgcaggtaacttaggaacgattgccaaagacatcgacaacgaacgctgtgtctttatcaaaggagacatttgtagccgcgatgtggtagacggtctttttgctgagtatcgttttgactatgtggtgaatttcgctgccgagagccatgtggaccgcagcattgaaaatccgcaactgtttctgattaccaacattctcggaacacagaacttactggattgtgcacgccgtgcatgggtaatggggaaagacgaacaaggatatccgacctggagaaaaggtgtacgctatcatcaggtatctaccgatgaggtgtatggttcattgggagccgaagggtatttcactgaagcaactccgctttgtcctcacagcccatacagtgcttctaagacaagtgcagacatggtggtaatggcttaccacgacacttataaaatgccggtaacgattacccgttgctccaacaactacggtccgtaccacttcccggaaaaattgattccgttgattatcaagaatatcctcgaaggaaagcatctccccgtctacggtgacggtagcaatgtgcgcgactggctttatgtggaagaccactgcaaagcaatcgacctcgttgtgcgtgaaggtcaagacggagaagtgtacaacgttggtggacacaacgagaaaacaaacctcgaaatcgtgaaactgacaatttcgactatccaccgtctgatggcagaaaatcccgaatatcgtcaggttctcaaaaagaaagtgaaagacgaaaacggagatatttcgatcgaatggatcaacgaagatctgattactttcgttaaggaccgtctgggacacgaccaacgttatgctatcgaccccaccaagataacaaatgccttaggatggtatcccgaaactaaattcgaggtcggtatcgtaaagacaatcgaatggtatttagccaaccaagcttgggtggaagaagttaccagcggagattatcagggttactacgaaaagatgtacgggaaatgattctcaatttatcaacattcctattgcaataagaatacccataagcagcatattacgcgaagtctcgcctaatatgctgtttaattttttaccgctgtatattttcaccatccgtttccaggtaaggaaatgagggatcagataaagttgcggaagaaaagcggcgtagaaatgaccttcacgaaggaaacacaagcagagaagagaagcggtaatccccagcatcaaataaaaatagcgaccgaatttctcgccgaaacgaacgatcactgtcctttttccactgcgtgcatccgcttcgcggtcacgataattattgactaccaacaatgtatcgataagcagtccgcagattaaagaggcgatagtgacatccggtgtccaggttagcgcctgtacgtaatatgttccgcctacaggtacaaagccgaaaaagacaatcaccaatacatcgccccaaccgttgtaagaaagaggataaggaccggtggtataaagaaaagcaaataacacacaaagcactcctacgataatcaattcccacccggcaaagaagagcaacgtacagccgataaggcaggcaagagcaactgtaataacaatcccggttttcatcgcttgcggagaaatccatccttgcgcacaagcacgttcggggcctaaccggtcttcccggtctgttcctttgaggaagtcgaaaaggtcattgatgaaattagcggcaatttgcatcagacttgcaaacagacagcagatcagtgcaggcaaccagtgaaaacgtccgtccattgcagcaagagcagtacctatcataaccggagttatggcccctgtcagcgttttgggacgtgcagctaatatccatgcttgtagcgagttacgctttacttcttccatactttaatatattataaatagttttgacggacaaagatacatgatttttcgtatctttgcaccccgaaaaacttcaaactaagagaagatgaagaaaataaaaacaatctaccctgttatcctgttgacattgcttttgctggtttcctgtaagtcgaaaaagaatatggtggctaccttgccacgccctgttttaaattcagattctatttatccggatacggctaatgccatagccgggttattctcccccgaccactcgcaactcaaagagctgaatgtttccaaaaacaaaaagcagaatacaaaggaaaagacttctaccgatacacacgaatcgtcggatctggtactgcggggaacaaaaatcacttcttccagcgtagatgtatcttctgtctataccggagtggaccgtgtagtaaaatatgactttacacaccgcgatgttcccgaagcctttgaaggtttccgtatcgctttcatttccgacttacactacaaaagtctgctgaaagaaaaaggcctgaacgaccttgtccgcctactgattgctcaaaaggctgatgtgcttctaatgggtggtgactatcaggaaggttgtgaatatgtggaacctttgttttccgcactggcacgcgtaaaaacaccgatgggcacttatggggtaatgggcaataacgactacgaacgttgccacgacgatattgtgaatacaatgaaacattacggcatgcgtccgttagaacatgaagtagatacgcttcgtaaagacgggcagcagatcattatcgctggagtgcgcaatccttttgatctggggcgcaacggagtatcgcctactctggcactctctcccaaagattttgtcatcttactggttcatactccggattacatagaagatgtttcagtagctaacaccgaccttgccctggcaggacacacccacggcggacaagtccgtgtattcggagttgccccggcacttaactcacactatggcaatcgtttcatcaccggactggcatataattctgcaaaaatacctttgattataacaaacggaataggaacctccaaattaccaatccgtgttggtgctccggcagaaatcatcgttattactcttcatcgattgacggagtaaagtatcgtagcttggtatgaaaaaacaacccgaatagtagcattctacatttttaaggtacgactttctgtgatataccacacttttaggatacgactttttgttaaagatcacatttttaatgtactacttttttgttaatatcccttttaatgcttacatttgcatctataagtagctgataataaaagaaagaagtatgagaagagatgcaatgcaagaattgtatgactggaaagaaaagtctacacgaaagcctttgattattcgcggagcccgtcaggtaggaaagacatggctcatgaaagagtttgcggctactgcttacaaacagtttgcttacatcaacttcgaagacaatgaagtgatgaaggagattttccaaaaagattttgatatcgaacgtattttaatggctatccaattagttaccggaaaagtagtaaatacggatactttaattctttttgacgagcttcaggaagctccacgcggtttgacagctatgaagtatttccaagagaaagcaccacagtatcatgtcattgcagctggttctttattggggattgcgatgcatcaaaatgattctttcccagtaggaaaagtcgattttatagacttatatccactttctttttccgagtttttagaagctatcggacaagaaccttttgccagcttgctcgctaagcaagattggaacctgatttctaccttccgctctaaactcaccgacttccttaaacagtattatttcgtaggaggaatgcctgaagtagtcaatgcctttattgaacacaaagactatgccgaagtccgccagttacaacaaaatatactggattcttatgatcgtgatttctccaaacatgctcctattgccgaagtacccagaattcgtatggtgtggcgttcgattccggcacagttagcaaaagaaaatcgcaaattcatttatggagttataaaagaaggagcaagagccaaagattttgaactgtctatggaatggttgatagatgccggccttatttataaagtaaaccgggtaaagaaaggtggaatacctttatcggcatacgaagatttttctgcattcaaactatttatgctggataccggattaatgggagcaatgagcggactccccccacaggcattattggaaggaaatgttttatttaccgattataaaggagcaattaccgaacaatatgtgttacaacaactgaaatcggtgaaaggcttgaatatttattactggtcttcagatacttccaaaggagagttggattttctattgcaaaaagaaatctatattattccggttgaagtgaaagcagaagaaaacttacagtcgaaaagtctgcgttcttttgttgaaaagaatccaggactacatggcattcgtttttccatgtcagattaccggcaacaggagtggctgacaaattatccgttatattctgtcggatatatattttaatatattcaaagacgtatattatctttcttttatagtctcccagacctttggatgcacaaagtatcgaacatctttccctgcatccaatgcttctcgaataaaagtagaactgatttcaaatacaggggaatgaacgagacgcaccgtttccggcaattcctcctctttgacgggaaagccgggacgggggtaaataagaatctgattctctttaatgatacgttcggactgataccaatatccaaaacgttcccaattatcggaaccgataatgaaataaaactcgcgatcgggaaatgcctcacgcagtttctccaacgtatatacgctatatgaggggcgaggcaaatgaaactcaaaatctgaagcctgaaaacgaggatagtcactgatgctcaactttaccagttcgagacgtaattcatcattccataacttctcctgtgctttcaaaggattctgaggactcaccataaaccagatttcatccaatccttcatactcacaaaggtagttggctagagcaagatgtccgatgtgaatcggattgaatgatccgctgaagattccggttttctgcttattcattgttccaaaaactctttgataactttcaaagcttccgctttagcagtttccaaattgtcattgacaatcacacaatcgaattgcggagcaaaacccaattcatattccgccttagcgatgcgactttcaatcacttccggcgcatccgttccacgtccttccaaccggcagcgtaattcttccaccgaaggcggctggataaacaccgacaatgcacgatcaccataaaacttcttgatattgcatccgccaaccacatctacgtcaaacaccacattctgacccgcttccaattgcttttctacctgcgctttcagcgttccgtaataacggtccttatacacctcctcatactccagaaattcgttgttctcaatgcgttggcgaaattcttccggcgtaaggaagaaatattcaaccccatgctgctccgttccacgcggaggacggctggtagcagaaatagaaaacgctaaattcaagttctgcgtcagcagataattgattatagtagatttgcccgaacccgacggagcagagaaaataattagcttaccggtcataagtttaatgaagaattaagaattaaaaatgatagatactgttttacatcacgttcagcacctgttccttaatctgttccagttcatccttcatctgaactacgatcttctgcatttcagcatgattggacttgctgcctaacgtgttgatctccctacccatttcctgggcgataaaaccaagctttttaccctgtccgctaccactttccatcgtgctgatgaaatatttcagatggttgctaagacgttgtttttcttcgttgacatccagcttttcgatgtagtaaatcagttcctgttccaaacgattcttgtcgtagtctacgcttaacgtcttttcgagagcatcagtgatgcgttccttcactttctctacacgttctttctcgtaaggagtaatctgttcgagcaaactgttgatgttggcaatcttctcacggaatttcttttccaatgcagccccctcctgtttgcggaaatctaccaaatgactgatggcttcaagtatggtagcatgcaccatgctccattcctcttccgtcagttcctgaatttccgttttcgtcatcacgtccggcatgcgaagtaatagttggagccagtcttccggtgcgggacaaggaatccccagttcgcggcttatcgaatccaactggctataataacttttcagtacatccttattgatgggagcagcatccgcaccctccttcttctctatccacaggctgaagtcagcttttccacgttccagaactttagaaatctcattacggatttcaatctctttttcacgatacgccggagcgatgcgagtggacaaatccattgccttgctgttgagcgacttgatttctacatttatttttttatcaggaagttcggccgtagctttaccgtatcctgtcatagactgtatcataaccttaaagttttgtgcaaaagtacacgaatattttaagaattggaaataatcatgtaaatttgcgacaatttaataagctgatttttatgtcgtgtatactgaatattgaaacctctacctctgtttgctcggtagcggccagtcaagacggacagacgatttttgtgaaagaagacttgaaaggcccttcacacgccgtgtctttaggagtttttgtagatgaagcattgtcgttcatagacagtcatgccatccctttggatgccgttgcagtgagttgcggaccgggttcgtacaccggactccgaatcggggtttctatggcgaaaggaatttgttacgggcgcaatatccccttgatcggtatcccgacgctggaagtattgagtgttccggtgctgttgtatcacgacttgcccgaaaacgctttgctttgtccgatgatcgacgcccgccgcatggaagtatatgcagccgtctatgaccgtcgtctacaagtgaaacgtacagttgccgccgacatcgtagatgagaactcttacctggagttcctgaacgaacaaccggtttatttctttggaaacggagccgacaaatgccgcgaacagatcacgcatccgaacgcacattttatcgacaatatccatccgttggctaaaatgatgttcccactggcagaaaaagcagtggccgatgaagactataaagacgtggcttacttcgaacctttctacctgaaagaattcgttgcctccatgccgaaaaagcttctttaattttttaatttttaattctcaattttaatttaacaaatgcaatacaatactcaacagaaaagaatgccgcttcccgaatacggacgtagcatccagaacatggtagattatgcgttgaccattcaggatcgtgcagaacgtcagcgttgtgccaacaccatcatcaacattatgggaaatatgttcccccatttgcgtgatgtacccgatttcaagcacaagctttgggaccacctggctatcatgtccggttttgagctggatattgactatccgtatgaaatcatccgcaaggacaatctggtgacccgcccggaccatatcccctactccactgcccgtatgcgttaccgtcactacggacatacgctggaagtactgataaaaaaagcgatcgaattccctgaaggaaacgaaaagagaaacctgattgcccttatctgcaaccacatgaaaaaggattacttggcatggaacaaagatacagtggacgacaaaaagattgccgaagacctatacgaactgtccaacggggaactccaaatgaccgacgatatcgtccggctgatggcagaacgcctgaatcagaactaccgtccgaagacgaactataccaacaatcgtcaaaacaataaaagaagatactaaacactttatacttaatactaaaaaaattaatggcttcatttgtaatcgaaggaggacatcggcttagcggagaaatccacccgcaaggagctaaaaacgaagttttgcagataatctgtgccacgttgctgaccgcagaggaagtgacggtgaacaatatacctgacattcttgatgtcaacaacctgattcagctcttgcgggagatgggagtgacggttgcaaagaaaggcattgattcttatagttttaaagcagaaaatgtagacctggcttatttggaaagcgatgaattcctaaagaaatgttccagtctgcgaggctctgtgatgcttataggtcccatggtggcacgtttcggcaaggcattgatttccaagccgggaggagataaaatcggtcgccgccgtctggacactcactttgtaggtattcagaatttaggggccgacttccgctacgacgaagagcggggtatctacgaaataacggccgacagacttcagggaagctatatgctactggacgaagcatctgtcaccggaacagccaacatcgtcatggcagccgtacttgccaaaggtacgaccaccatttacaatgccgcctgcgaaccctacgtgcaacaactctgccggttactcaaccggatgggagccaaaatcagcggtatcgcatccaacctgctcaccatcgaaggcgtggaagaactgcacggcacgcaacacaccgtactgcccgacatgattgaagtgggcagcttcatcggcatggcggcaatgacgaaaagcgaaattaccatcaagaatgtttcttacgaaaatcttggaatcatccccgagagcttccgccgtctgggcatcaagctcgaacagagaggagacgatatttacgttcccgcacaggaaacataccagatagaatcatttatcgacggctccatcatgacgatagccgacgccacttggccgggactgactcccgacttgctaagtgtgatgctcgttgtagccacacaagccaaaggcagcgtactgatccatcagaaaatgttcgaaagccgcctgttctttgtggacaagctgatcgacatgggtgcacagatcattctctgcgaccctcaccgtgccgtagtcatcggacacaaccacggcttcaagctgcgcggcgcccgcctgacttcaccggatatacgtgccggtatcgcccttctgattgccgccatgagcgccgaaggaaccagtaccattagtaacatcgaacagatagaccgtggttatcagaacatcgaaggacgtctgaacgctatcggagccagaatcacccggatatgataaagaaagaagaagtatacaagataggattattcaataaaccgcacggcatccacggcgaattgcaatttaccttcacggacgatattttcgaccgtgtggactgtgattacctgatatgcctgctcgatggcattttcgtgcctttcttcatcgaagaataccgcttccgttcagactccaccgccttggtgaaactggaaggagtcgacagtgccgaacgtgcccgaatgttcaccaacattgaagtctacttccccgtgaaacacgccgaagaagcggaagatggcgaattatcctggaacttctttatcggtttccagatggaagacatccatcacggacttctgggagaagtcatagatgtagataccactacggtaaacacccttttcgtggttgaaggagcggaagaagaggaactgctcgttcccgcccaggaggaatttatcgtaggaatagaccagaaacagaaactcatcacggtggaacttcccgaagggttgctcaatctggaggaattggaagatgaccggtgagaacgaataaaacgatgagccgctcatccactgaaaatagtaaatagtaaatagtaaaaacagtaaatacccgagatgccaaagagaagacgaagtaaagctttctggaaaaatttcaagttcaagtataaactaacgatcgttaatgaaaatacacttgaagaaattgtcggacttcgcgtatccaagctcaatggactttccgtattactttgcgtgctggcggtacttttcctgatcgcttcctgcatcatcaccttcaccccgctgcgcaactaccttcccggatacatgaacagtgaagtccgtacacaaatcgtggacaatgccctgcgtgtagactctttacaacaagtgctcaacaagcagaatctttacatcatgaacattcaggatatcttcagtggaaaagtatccatcgacagcgtgcagacactcgattcactgaccactgcccgcgaagacacactgatggaacgtaccaaacgggaagaagaattccgccgtcagtatgaagagaatgaaaaatataacctgacctccatcacttcccaaccggacgtgaccggactcattttataccgtccgacacgaggtatggtgtccgaccacttcaatgccgagaagaaacattacggcaccgacatcgccgccaatcccaacgaaagtgtattggcaaccatggacgggaccgtcatcctaagtacatacaccgccgagacaggttatctgattggcgtacaacataaccaggatttaatttcaatctataaacactgcggctccctcctgaaaaaggaaggtgaacgcgtgaaaggaggggaagccatcgctctggtaggaaacagcggcacacttagtacagggccgcacctccatttcgaactttggtataaaggtcatccggtgaatcccgaaaaatacatcgtattttaagtgataatagaaaaatgaatatagagactaacaaaaagaaaaaacaaatagctatcctaggctcaacaggctccatcgggacgcaggctctgcaagtcatcgaagaacatcccgacctgtacgaagcctatgcgctgacagccaacaaccgcgtggaactactgattgcccaggcacggaagttccagccggaagtggtagtgatagccaacgaagaaaagtattccgaactgaaagaagcattgagcgacctgcctatcaaagtgtacgcaggcacagacgctatctgtcagattgtagaagcaggccccatcgacatggtgttgacagccatggtcggttatgccggactaaaaccaaccatcaacgccatccgcgccaagaaagcgattgcgttggccaataaagaaacattggtagtagcgggcgaactgattaatcagttggcacaacaatatcgcactccgattctgccggtagactctgaacactctgctgtttttcagtgtttagcgggagaagtgggtaacccgatcgagaaagtgatattgacagcctccggaggtccgttccgcacttgcaccctggaacagctgaaatccgtcacaaagacgcaagccttgaaacatcccaactgggaaatgggagcaaaaatcacaatcgactccgcttccatgatgaataaaggttttgaggtgatcgaagccaaatggttgtttggtgttcagcccagccagatcgaagtggtggtgcatccgcaatcagtcattcactcgatggtgcagtttgaagacggagctgtcaaggcacaacttgggatgccggatatgcgcctgcccatccagtacgcattctcctaccccgaccgtatcagctcttctttcgacagactcgatttctcccaatgcacgaatctgacgtttgagcaacccgatacgaaacggttccgcaacctggcactcgcctacgaagcgatgtaccgcggagggaatatgccctgtatcgtcaatgctgccaatgaagtagtggtagcctctttcctaaaagacgacatcagcttcctcggcatgagcgacgtaatagagaaaacaatggaacgggttgccttcatcgccaatccgacatacgacgattatgtagctacggatgcggaagcaaggaaaatagcagccagtctgatatgatccgcttcatcccattgatgaacaaagaaaataaagaaattgattagtattaatataaattgaaaatagcctttatatcctctcttcggtagagaattagttgaaggctttaaactgtaaatagactatatggaaacatttttgattcgtgccctgcaattgattatgagcttatccttgctcgttatcgttcatgaaggcgggcattttctttttgcccgtttgtttaaggtgcgtgtagaaaaattctgcttattttttgacccttggttcaccctttttaagttcaaacccaagaaaagtgacacagagtatgcagtaggctggttgccattgggcggttatgtcaaaatagccggcatgattgatgagtcgatggataccgaacagatgaaacaacccgaacaaccgtgggagttccgttccaagccggcgtggcaacgtctgctgataatggtgggtggcgtactgttcaacttcctgttggcactgttcatctactccatgattctttttgcatggggcgaccaatatataaaggtacaggaagcccctcttggtatggaattcaacgagactgccaaagcggtaggtttccaggacggtgatatcctcctttctgccgacggtgttcctttcgaacgttatgacggcgacatgttgagccagattgccgatgcacgcgaagtaagcgtcatccgtaacggggcaaaagcctccgtctatatcccggaagacctgatgcaacgcctcttggcagacagtgtccgcttcgcctcctaccgtttcccgtacgttatagacagcgtaatggtgaactctcctgccgcacaagcaggaatccaggcaggtgacagcatcatcgccctgaacggaacaccgatctctttctccgacttcaaagaagcgatggcagaacgtaagaaaaacgaagcaaccctgctcaaagacagcatagatccacgtctaatcacgctgacttatgtgcgtaacggtgcaacagacacgctaagtatgcgtgtagactccgcctacctgatgggtgtaaccgcctgtctcgtcacagaccgtctgctccctatggtaaaaaaagaatatgctttctttgaatccttccccgcaggtgtctccctcggtgtgaaaaccctgaaaggctatgtaggaaacatgaaatacctcttctcgaaagaaggagccaaacagttgggcggcttcggaacgatcggcagcatcttccccgctacctgggactggcaccagttctggtatatgacagccttcctttccatcatcctggctttcatgaacatcctccctatccccgcattagacggtggccacgtgctcttcctcttctacgagatgatagcccgccgcaaaccgagcgacaagtttatggaatacgcccagatgaccggtatgattctgctcttcggtctgttgatatgggctaacttcaatgatattttgcgattcttcttctagcgaatataacaatagaaagatagagaaaacatataaaaagaatcatcccggatgaaaaaggttttaaaaaccaattttcatccgggatctttttttattgttgtttgtctttaaatcttcaacatcttcttctctctctccaaatccgtctcatccaacttaggtgaaggcaccgtgcacgttttgatataatctccctcctgacacgtataattatagtacacctccaattccggagtcaattccgcccgcggaaccagacacccttccatctccagaaactgattaacatccgtactatccgactgtttcaccaatacaatacgacgcgcaatcggattatgattgtagtccagacagagataaagccctttcagcatattcggaaactcataatgcggaagttgcaggtaaatagtcaccagcgcaaactgtggcaaatccctttcgttgaacatcaggtaagagttctgatgattactgataatcccgctcccccaatgcaccgacttatacgcattaatcatccccaccttcacatactcattattctcggaagcacaaatcatgtacggctcgatcttcaagctatccgtagaagacgacaaactgtaactaagatacataccgctataattatacacctcctgcacagactccttcgcctctttccccagcaacttgataaaagagttgccattctccgcctcgctctgcacgtccggttccatctcctgaagcaacagcctcaccgatcccacattatttaataagcgtttcttggaaacattattcaccagtgccaaagcttcatccagcgcctcgtccggtgtgcgtgttttcaataaatcgatataagcgggaagcacactcgaatacaaagcagacaacacactcggagccatatccacccggtcggcaatttctttcatcttcaccccgttgttgcgcaggtactctattcttttataaatatccgtaagttcgtccatgatttttcggtttgttaattgattccgttgcaaaggaatgactaaggtattatgtttgtattgcatgaatattacattaatatttcagtacacttaaaggctcatatatacaatatgattcattgaaattcattttttcgttcgctccgacaccctacttttgcaccggaaacaaaaaaatagcattatgaatttcaaagaaaaactgtcgccttcggcccaaaagaaactttccgatttactctttatcctttatgcgggaggagcggcactgctatcctattcattagtctacgcactacgcaaaccgttcaccgccgccacgttcgacggcatggaactatttggtatggactataagatagccaccagcatcatccagatattcggatatatggtatccaagtttatcgggatcaaacttatttccgaactgaagagagaaggccgcctgaaattcattcttgtttctattttagtggccgaactctctttggttcttttcggatgcctgccccgcccgttcaatgtgttggcgttgttcttcaacggactgtcgcttggctgtatgtggggagtcatcttcagcttcctcgaaggacgccgggtgacggatctgctcgcttcccttttcggactcagtatcgcagtcagtagcggcacagccaaatccatcggacttttcgttgtcgacaccctgcacgtcagtgagttctggatgcctgcactgatcggtgcggtagcattgcccttgctggcaggactgggctatatcctcgatcacctgcccaaaccgactgccgaagacaaagcactgcgtgtggaacgtgtcactctcaacaaacaacaacgctggaacctgttccgcagctttgctcccatattgacactgcttttcttcgccaacctctttctcaccgttttgcaagatgtcaaggaagactttctggtgaaaatcatagacgtcaatgccgccggactttccccgtgggtattcgccaaagtggacggtgtagtcacactgattatcctggccattttcgccaccttggcagtgatgaaaagccacatcaaagtactttccgttctattgacccttgtcattgcgggagcaatcacacttagcactgtggcattcaactaccataccctgcaactttctccgctcgtgtggttatttatccagagcctctgcctctatttttcctacttgagctttcaaaccattttcttcgaccgcttcatcgcctgtttccgcatcaagggaaatgtaggtttcttcatagcgatggtcgattccatcggctacacaggcacagtggtggtattggtagtgaaagaatgtttcaacccggatttgaattggctggagttctacaatacgatggcagggacagtaggaatcgtctgcacctttgcgttcaccttagcaatgatttatctgacacaaaaatacagaaaagggaaacagggtgaaatacgcgggaacgaatcctgccccgtcccctccctcgcttcttattaatttccgacgaataaaccaatattatatagaaacaagaatgaaaaagattgaatgtattattatggactgggctggtacagccgttgactatggatgttttgcccccgtggctgcttttatcgaagcatttgccgaaaaaggactggtaatcgatgttgtacagacccgcaaaccaatgggactacccaaaattcaacacatccgcgaactactttccatgcctgacgtgaacgaacagtttaccgcccgttaccaacgcgcctggacggaagaagacgtggtagaactaaaccgccttttcgagaagcatctcttcgcctctctcgaaaactacacagaccctattccgggagtaatcccaactttggaaaaattgcgtgccgcaggtattaaaataggatcgaccaccggctatacccgcgaaatgatggatgtagttctccccgccgcacaggcaaaaggataccacgtggattattgcgccactcccaacctgcttcccgccggacgtcccgctccttacatgatttttgagaacctgacgaaattagcagtccccagcctcgacgccgttataaaagtgggtgatacgattgccgatattctcgaaggagtgaacgcgaaagtgtatagtgtaggcgtgattctcggcagcaatgaaatggcacttaccgaagcagaaacaaaatcaatgcctgcctccgaactcgaagcccgcatcgccgatgtcaaagagcgcatgcttgccgcaggagcttcttacgtgatacgcactatcgaagaacttcccgcactgattgaaacgatcaacgccggcaactaacattcaagcccgcacccaacaatcagaaaagaaacaaaatcatttatttattcatttctaaagaaaacatcattatgaaaccatatttgttattaactccgggacctctaaccacctctgaaacagtaaaagaagccatgatgaccgactggtgtacatgggacgaagactacaacctcggcattgttcaggaactccgcaaagacctggttaacatcgccactaaaaaaccggaagaatacacttccatccttttacagggaagcggaacctattgcgtggaggccgttttaggcgccaccatcaccccgaaagacaaactcctgatttgtagcaacggagcctatggcgaccgtatgggcaacattgcagaatattaccatctcgactacgacatgctggcttttgaagaaacagagcaggtatcagttgaatatgtagacgattatcttagcaataactccgatatcacacatgtcgctttcgttcattgcgaaacaacgaccggtatcctgaatccgatcaaagaactgtcccacatcgtcaagatgcatggtaaaaagctgattgtagactgtatgagcagcttcggaggtatccccttagatgtaaacgaactcggtatcgacttcctaatcagcagttccaacaagtgtattcagggtgtaccgggattcggattcatcatcgcccgccgttcggaattaaaatattgcaaaggagtggcacgctctctttccctggacatctacgaccaatgggaaacaatggaaaaaggacacggaaaatggcgcttcacttcaccgacacacgttgtccgtgctttcaaacaagccctgaccgaattgattgaagaaggaggcgtagaagcacgttaccaacgctactgcgaaaatcaccgtattttggtggaaggtatgcgtgcactcggattcaaaacattactcgaagatgacatccagtcgcctatcatcacttctttcctttatccgcatgaaggattcgacttcaaaacattctactatgcactgaaaaataaaggattcgtgatttacccgggaaagatttcaaaagcagataccttccgtatcggaaacatcggtgatgtgcatccggaagacttccgccgtctggtagaagtcatacgggaaacgaaatactagaaagtcaaatctttcaagttcatcttgaatgattacttactaatatgttgtatgatgttcctgtgaagttctgaaagacttaatcctctttcaggacttcattattttcttttcagggtggaaggctgtgatagcctcaagctactgacgatagctgccacaacggcaaacccactccccaccatcaggcaaacagccgtgctccggctatgagtgacaaagctgaaaagcaaggcaaccaatgttgttccggtggtctgtcccaacaggcgggccattcccagcatcccactggcccctcccgaacgctgcgtaggagcggaagagataattgtactgttgtttggcgtctgaaacaatccgaagcctgcaccgcataacatcaaacgcaggataatacttatatcagatgattcggcagtcagactggaaagcgagaaaagcccgatggcaaacaaaaccatcccgatacttcccagtataccggggtgaatacgctccacgagataccctgccaatggagccgtgaccagcgtagccaacggccacggagtaagcaaaagtccggtcatcacctcactgtgtcctaaagtgttctgcaggaaaaaaggcagggaaaccattgccgacatttgagcgataaaggaacaaatggaagtcaggatggataaccggaaaatcggaatccgcaacaggtcgagcggcaatagaggagtagtctgtgtgagttgccggcgcacatagtacgtgcctaccactgccaatacaaccagttggatgaaaaggaaatccatttcctcgtgatgggcgaatccgtccagcgtatatataagcaggccgaaggtaaccgcattcgctatggcgctgatataatcgaatttgcgtttcgagcgttcctcctgccttggcagatgtttgatgccgagaaacaatgcggtaagtcctaacggaacattaatagcaaataaccagtgccagctggcaatagaaagaataccgctcgccacagaaggcccggcggcagccgatatggcaacgaccatcgcattaatccccattccccgcccaatctggctcttcggatagatataacgtagctgtgccgtattcacgctggtgatggcagaggcactgaacccctgaaaaatacgggcgacggttagcgtccaaaacgaatcggacaaggcacagatcaatgaagtgatgcaaaacaggccgatacccgaaagaaagactttccggtaaccgatgatttcacccaaagcggaaaaagacagtagcgatatgacgatggccagctgatagccgttgataatccaggtggttacagcgggagaagtcccaaaatcatgcgaaagcgtgggtagtacgatattgacgatgttaatatccaataccgacatacaaagagcgaatccaacggacaccaccgcccaaatacgcttaggcatcggcaatccgtcggtttcctctattttttgagttgaatttatcgattgtaccataaaaacttattcttgtaagtagtcattcttttttcaccataaagcaacgcagggatgcaaacacaaacaccaccgactacaaaaaaagcaccgcgttactccgtgatgaaaaatgattcacttggtttcgtaaaggtaaacaaaacaatggtacaggtgtttttgtttcctttgaaaaataagtttttttagtggagaaaagtcgttacttcaacttcaagatccgttgattactgcttcccctgaactccagatacggagagaaaagagcctgctcgaagcgtccgtccaccaacacatctatataatcaagagcagcactcaagcggggctgtgccttgatttcttcgtagctatatcctgtatagcaccacacattcatccccgtctcctctttcacccgtttcagtaaaagcagaaactcctccggatggaagaacggatcaccaccggaaaaagtaacaccgtccagcaaaggatttgccttgatttcacggatgatggactgtattttttcttccgtcaactcttcccccgccctcggattccagctctccgggttgtggcaaccaggacagtgatgggaacatccggcaagataaatagagtaccggatgccttcaccatcgacaatcgtttcaggataagttcctaataaattcacttctacaggtgttttacgcggtcttgttcttctgcccgtttagcagagttccaggaactcaaatcgcctgtcaggtaaccggttatacggcgcatacgaaggatgctttcactctggcacaccggacatttatcgaagataacccctttgtaaccacagttatggcaagtatctaccgggtgattgatagagccgtagccaatcccctcgtcgtgcatcactttcacaatcttggcgatggcacgtacattcttctgtgcttcaccgtccagttctacatacgtgatatgtccgccgcgcgtaatggcgtggaacggagcttcacgcttgattttctcaacgatgctgatcggttctttcacgtctacgtgaaaagagttgacataatagtcgcggtctgtcactccggggatttttccatatttccgacgatccattttagtgaaacgtcccgaaagtccttcggcaggagtagccagaacggagtagttcaggttatatttctctttatattcgtttaccactttattcatttccatcaccgcttcatacagcgtgtcccatgctttctggttgtggccgtgaccttgtccgtagagagccaccatcgcgttgtgtccgccgataaatccgatacccagcgtaccgctgcgcaatgcatcacccacctgttcattcgggttcagctcaccgccgcctttccacacattatttcccatcatgaacgggaactgacgtgccagggccgtacgctgatactgataacgctcgtaaagctgatcggctacaagcacggacatttggtgtacggattcgatgaaaatttcttttgccttctgttcaatggcatccttgttgcgttcatcctctatcaggttttccgccttgatgcgggcttcaatcgccagtctcggcatattcagcgtagtgaatgaaagattgccacgacctaaagaagatttttctcctgccacgttttcaaagacacgggtgcgacaacccatcgtcgccaattcgtagatgtaacgtttcggatcgtccgctctccatttctcgttctgattgaaaggtgcgtcgaggaacatgaagttcgggaacaatgctttcgccgtagtctggcaagccttcaacagcaagtcgaagttgggagcctcgtaacggtcggtcattgcctcttcgatattttccgctttcattgctttctcaaagtctttttccgagtaagaaactccgtctttcaccttgaaaatctggatcgggaatacaggcacctcacctcttgtacccaatccttcaatggtagctttcagcaattcttcgatcaccatgcggccttcggcagaagtgtccgtaccgtagttgatggagctgaataccacctgattaccgccacgtgaatgcatcgtgttcaggttgtggataaatccttccatggcctgatgggtatctttgcgagtctgctgataagctttctcaacgatacgggcaaggtgttccttatctataataatctgtaaagccaccaaagcaatgcgcaatgtttcgcgttcggcttcagtagtcttgatagacggaagatattctttaatcaatgtgcggatggatttctcatcggcctgatttccgttttccatggcgacatagaaattgatgaacgatgccagatgcttgcggaaagatttggccacaccttttgccatgaagaaatcgaaagcaggaattgcctgtccgccatgctgctcattctgattcgtctggaaaataatagtagccaacgtagcataactctggatgctttgcggggtacggatactaccgttcttggtgcgaaaaccacgttcaaagaggtcatccatatcatattggatacaggtcgtcgtctttgtcggataataatccaagtcgtgaatgtgaatatctcccaactggtgcgcttcggcaaaacgtttcggcaacaggtatttatacgtataatctttggttacttcggaagcgaacgtcatcatctgtccggcaggcgtgtgactgctcatgttggcattgctcaagttgacatcgttcttgtcgatagcaacgatgccgtccatcacttgcttcatctgggttttcttatcgcgctccgtattccgccattcgcgataaataatatatttcttcgctacttccgggcgtactttcatcaacgacttttctactaaatcctgaatctcttctacggtaatagtaggagtagtaaactgactgattacgttcatagtgatgtcagccaccaactgctgctcatcctgaatacctgttgcactgaatgctttactaattgcattcttgatcttactgatagagaaatcttctctcttaccatcacgtttgatgatacaaatttccgcgtagttcataactttaactcccgaaagtttaaatttaaaatattgataactaaaagaaaaagttccggcaggtcttctgacttatccctccctcgcaacaccttcccacaccgacatcgatgcagtggcttattgtgcggattcttagagaattacagcagcgggtactgtcgccgatttacacagcgttccctcattgactaaacctcttttagctccgaaaccggatacaaagatagaagataatctaatagcttggttagcttttaacattaaatttcgggaaacatttctttctcgctgatacagaaagttttccaaaacggaaaacttttttctgattttaacgtggataatattccaattccgtttatttcacccaaaagacatatatagtttttagctacttcactcttagcgaaaaaagaatgtgtgtaaaagtctccacaactatcttttgcttcataagttacagactatttttcactttcgaccaaacctttctttccgataaaatgaaagaaattataatttttcgatttcttctttcgaaagcccggtagattttatgataatatcgtcagccactcctaattctttcaaattacgagctgtttcttctttacctttttgcaagcctttctgttcagcaaagtccaacgtattaaaataatcgttataaactttccattcttcttcatactgggctctttcctcctgggtcatatttgctttggaagccaacttttcaagtcgctcgaagacggccttgcgagccttgaaaggcatccggtcaagtgtatccatatgctttagtatataaatccagcgttcaaaatcattttcacattcatcctcctctttgttgaagttcggcagttcgataaaaatctgccggaacttgttgctgaagagcttccccgtatccctgtcagaaagaacgatatccgttctgattttagagggcatatccttgtccatcacgaaattcatgaagaacactccgtacacggcatccaattgaaagttccaaactccccttttcgcctgctgcgtaatggccctagaaagatagaagagggcacgatctttaaagtaaggctgttcccggttctgcatttctacgataatacgttcaccggtatcggttacgcaatagatgtcgtagataagacctcgttctgtttttacttccggctgctgttcactgttaaggaactgaatgtcggtaatcacatgctctcctacgagcaaatcgttcaagaagtcgattaacaactccttttctacctctctgccgaataaaaacttaaagccaaaatcggtaaagggattgataaatcttcccattatatgctgtgtctcaattacaaaacaaagatagagtttttttgttgaatacggtcaagaatagaaaaaaataaatgggtacaaaaaaagaagctgcctcattcatcgggagacagcttcttcatttgaaccttgagccttactttactttcactttatgagttgctccacgtttgttaccggttccgtgagctatgtgcgggcggcacgtttcgttttttttcaggatcatttttttacacgtacactaatctttttccgtcttactgcttctccgatgacggaaccgcagaacagcctcaagaatgtctaacaacttttccagtaataatttcattcgcttttctattaaggttgataatctattttatatcggtcgaagtgcaaccatcagctatacccgattcgcggctactgataagtctatcaataagctttagtttgcctgacaaacttatcagttaatccctacggattcagctgccagctgcacttccggtcaagcggccgggtccggcgcttctcctcctccgccaccgggttcgtcgccgtcatccgggtctttgtcaacgacatcgtcggccacaaacgaacccgctacatccttgatgtgcacaaactccactccggtggtcaatgcgcgggtagcacttccgttagcggcacgggtgtattcaggggtaaactgacaacgcaatgaagtgatctgcgaactgctgactttactctccaactccactccttttcctcctgctttggcaatcattgtaaatgttcccaagccttcgaggcgcaccgtgcggctgttgagcaactgttcgcgcatcaccgacatcaggttacgaatcacgttatgaacatcacccgccgtcagcgaggctttttctgcaatcaattccgccattttctgcgtattgaccattttcccgaatttcaccagacggggataataaagtttctgtccttccttgttggcaagtgttgcctgataaggtttgtaaattaatggcatactgttttcctttcttttttgattgatgaataaataactactgtttgtaaccgattacgaagacaaaagtacacgaagagaaaaaagcagggaaacacgatgttacaacccgtcgcaagagagaacagacaaacacaatttgatacgattcatgcctacaaaggcttctgtacaaaacagaaccaaccgacataaaaaggcgtacctttgcatgagttcatacaaaataaacctctaaaaaacagtcaatatgaaaacagaaacaactccaaaagcagaaacagagagccgtacccgcatacaagcctatagcaaaagccagttggccggactttacctacctcacatacagtccgcctcggcacgacgcaccctccgtagttggattgccaagaacactgcactgcaagccgcactcgctcaaaccggatatagtgaaaaagccatcctgctcactccggcacaagtaaggctgttcttcaagtttttaggagagccctgaaacgactcttttacaaagaaaatatcattcggagaaagataaagccaaacaaggcaagaaaaaaggcaagccaaagcaaagcggacatttcatcacagatcacgcgaatcaaattataacttgctgattgctgttataaagagtccaagataatctgtaacgaactgtccgctcattatataaaaaaaggattatatcattccggagtaccttctcccgacggcttcatcaaatcggctgtaacctccgctttaaaacggacaccgtcgtgaagccgcagattcaatttgacagtaacattctcatcgttgttacgcttcacataaaacgttcccgtcacccttttatattgggaataataatagaacggatcttcgtaaataaagaaatactggtcgttttggtacaaggtcgatgcatccaccacttgcccctcccaatacatacccagagaaaacaaaaaataagtactagttttcccgtcctgtatcttttccggagaaaagatacaggtaaaataaccaccgtccatagtagcctcaccggacacgatcctgttcgcttccccccggaatgaataagtaccgatggaaggcaattcctccacatccggaccgggatttaccggatcattatctttatcgtcactacatccggcaaaacccaccagaagcaatcccgataaaacatataaatttaaatatttcaataagattttcttcatgaatacacttcattaaatcgtcactctattactgtcaccgcacctttatagtagccggacaaactggcatcgccatatttcttaatacctaccacttcaaaagtcatttcaacttcattgccctgaagagacaccgaagtccggcctcccagagccagattgcccaatgtggtattagcccgactgtaagtcactccttcatacgtaatcgagattttcacattttcatcatcaccggagaatccgcggagcactccatccagcattgttttcgaaagacgcaccactgcatccgctgccgacattcccgccacagtagtgatacctggttgtcgtgaaaggtaaataacacaaatatccgcatccgtcttatctatcaccacagactggatagtgaccggagtaccgtccgcccctaagcgatattcattcgggatcgtcgtatcatacaccgcgaaagcaccgttatagttacctgatattttaaggctattatcacccaaatatttgaggttaagcgtcaatgaatattcattatccgctgatttcgatacactgaacgtacctgccgcatcctccaggtgacctttggatatttgtattctttcttcgtcatacgggctataataagtaaactcaaaagccagattggtatctgtaatatccacctcctgcccgttaagtcctgcattcggaacaaaaaggcgcacataatacgagtttacattttccaagtccgcagcagatgaaattcccgacggagtgagatacaacgctactcctgcatctgtcttttcatagaaagtagctttgatgtcacgcgttttttctccgttcaacgttaatatattcgtcgtactctgcttaatttcagaataagcaccctcataagaaccttcgaacttttcacccgaaagcaaagtaaagctaaaagttactttcacatgatcgtccgtcttttctactttgaacttacctgccgaacatatttcagaccatccataaggctccaccgcacccagatcgtcagctcccaattctgtcatattatagaaagcataatccgtaccgtcataagacgtgatatccaatacctgtcccaacatatccggattgattccgatcatcaggaactccgtgtccgacatatcttccaccgttgtcactcccgcgtccggactaagataaaggtattgaatccctccgatgacagtagccaccgccgatttcaacggacgcacttcacttccgaaagaaaattcactgggcaactttgcaggagccttgtagctacaaccagcctcccctgtaaacttaccgccacttttcagcgtacaatcaaaagtagctttcacagccgatatctcattctcacccggagtcatcgtcaaagtgatcttgccttgcgtcagcacctcttcccattcgtaagggtccacggctacaatagcctcaccatcggcatccatgtaataaagcacataatcgtcaccttcagagctgcctaccgtaaccggactgcccaccagactcttatccactcccagcatcacatattcctttccgctattcataaagtcttcaagcgtttccaaactctgcaacggactcatacacacatacacaatgccatcctgttcaaaacaagacaccgatttagcttgtatcgtcttatccttatacgtatacgtattcactgtttccacaggttccagttccggctccggttcgggatcagtggccggatcatcgtcactacatgccacaaaacaactcattgccaacatgaataagaaaaaggaaataaatctagttttcatatttctcgttttttgggttaattataaaatcgcgttattagtaaaatgatgccatccacccgtgtttactgcggacgataatcaaatacggtaataggagcatcctgcgaataagtggtacgtacatgattcgggtgttccttatcacagtcaataaaatctatcgtcagcgtgtgtttgtcaccgtcgcgtgccacagtcatggttccgccgtctatgcgtgcatattctttcatggctccgttctgaagtttctcataccaggttcctcccggataagtaaagccgttaggatagcccgaagctatgtttcccggtttcagcaactcgcgcgggataccatatgattccttatcacgcgccaccaccgtataagtacctgccggaataccctgtgttacatccgtagcccattccacgaaaaattccaccttcaatactcttccattaccggccggccaagtgtcgacaagacttatactctcttccgccagataaagctcgactacccggcacgactcatcttgcagataataagaatcgcccttatcctgcaggcgggcttgcgtccatccattcagtgcaatatcggtggtcagcgtagaattaggagtttcatccttgctttcgtgacggtcgatggtgattacttttcccgtataggtgaaataacgtttcaaggaaagatcgcccaccaatgttccgctaatcgaatattcaccaccggacagccgtttcaccgtcattttaccaccggaaagcaaatcggcatcgacactcgtagagtaagatttcacatcaccgtagaaagttccggcaggaatatccacctttccggtcgggagatcgatttgattcatatatccgaggttgaatgtccattcatcaaacgtgtatccgttcaatgctgcatcaaaagtgccttcagggagcggaaattccgtagcttccgaagcaaatggcgggacattcaggctgaacgccatgatcttgcccggtcctatcggattaccagtagcatctacttccatatccgtataaagcgtcaatacaaaatgatctgtgcccactccgtctttatctccccagtacaccaggttggagttgacaaactccaccacttccggcgccgggtttacgtcttctccaccgggttttcctccctccggattttcggcgtcattgtcactgcaagcggtcaacacccccacagacgcaacagcgaacaggcagacacccaataacttcattattttcttatccatatcagactgatttatatattttacatcattgaaaagaacttccgtagcgaccgggaatcataaaaaaggcggagtaagctcgggaaaaggattcccattcttcgcacgagtatccccgcctgtcatatagtaaagttaaattaagagagaattagtaaattctcattccgtttcacaacggtagttcttttctttattcatcaatgttatgttcgttttatctgaaaagtgcaatatccgggaaaaggatacaatctttcagtgtcccggtcaggaactgctgtccgtcaaacaatgctatcgccaggtagcatccgctttccggtgctccggtcacgtcctgaaaactgactccgacagaaccgtcctgataaagcacaggagcgaaaccgaaatttcctttcgaataaatattggaagaagccgctacagaaaagccgtacagggtttgcaaaacaacacctgccccatcatccgatgttccgtccgatactccacctgacgttccgtccgaagcgccttctgccacctcatccgcaacttcttccacgaccgtaaagtctttctgtgccgcaccgataggaaccacaaacgatccattttcataggtagcctgcaatgaaatcgtagcctttgcggggtctttcagatattgcgctgccggagtatttgccaacgacatcttaatggtatatccctcgccatcgacattcttcgaaatttcagtagccgacaagggataggcgttttcgatattcttcgtatcccatttcacataaatccggctatttccccacactccaagcaggtccgtcgcttcatactggtagacgtagtaaaggaacttccgcccctcattggtgctgaccaataactggcaggcacggggatttccggttttgttctctttcaacacaagcaagaaaccatcttcttttgaagcagccggcacctccacccagtcgattccccgctgcacgctcactttgaaatcaaacgaactattcacacgtacaatcgtctgtgaaggagcatttccgaagcgtatcacctgctggtcggagtcgggagcaaaaatatttccctcctgcgtcactacaattttctgttcgctattaccatcgctcacggtcacctgcgtggcacgtgacgtatattcataattggctctggcaagcaaagttatcttttcgtttgtcacttcgattaccctgcaccagtccgcacccgaaacggcagtcagttctccggtagcctgcaaagccacttccaccgttccgcctccggctgccagatcgacgtccgcattcatgatgcggaagccttgtgccgtttcatcgttttccttgtcgcacgctgtcatcagcaaacagcacgcagataataacagtataactaacttattcatcatatcattcttctattgtttttttaatcaacctgattgctgcaactgcatccgtgtatcccatgaaagaggcctcctcatcctgcgagtcgtacacaccgaagataaatccggagatttcacccatccacactccattgtccaccagataaatgccgtcggtggtaggataactgataagaccgattgccgaactgcgcaaaacataatcattcatcaaatcccacatagccagatacacgtaacctccctgtactttcttcaaaaattgcggcaagatggaaagtccgccacgcggcttgtcataagttaccagaatgtcatattcgagtcctttgagccaatagctcttgccgtcctcgtccttcaccagttgaatctcctgcgaagccacttccatctggttcgtcgcatcgttcagacgataaaaatccatctggtaagtgcctggataatagtcgtaactttgatacccggcagtatagacacccgccagtttcacctccgtagctccttcgtcggtacaaacaaagctgatctcctcgttcttccagacaaaattctgcatggtttgtccgtctatcgtcaccggttcgtgaaaacgcattccgtcggtggtaaacataaaaggtacggttttctgatgcacctttccaacttcgtcataataggtcacaatgaacgtatagttgctgcgtagcatttgcccggtgtagagtccgtccatccgcaggtcgtattcataaaagaaagcatcgtcttccactttctttatccgggtgagatattgcttccacgtctggtcggcagaaaaagccttcatcacgatgcggttgccatatttcttgcctttcagttcgatacggtcggcggtggcatcggagatcacgaattcgtagtcgcctccgagcgttccgttcgggtcgtcggccatacttccctgtggttgaccgaaataatgcaccagataattgtaggtatcgaaagacaacatcgttgcctgctcggacttgacgctataaagcgaactgaccgtctcatccgctcccgctatctgcgaagccatcgtcacccgctggccgtcgaacttgcaaagcagggtaatacctcccagcgagtagtccttaccgacgtaatattccatcacccatccgttgggtgctgcttccagcagttcgctgcaacgcttcacatcggccgtggcacggttggcagacgaatcgtcaaaataatcttcttcctgaaagaggcacgactgcaaacccaggcagacaagggccaacaggaaatatatcgttctatttttcttcatcataataatgtgtaattaaataatcatccaatcgtcaatcaaaaaaacaagaggtgaccggcacttattgaatagtgctcaagtcaatttcggtaatctcctgctggcggcgcagcacgattttacgaagttcgttgaggtcgatcccccatgtgtcgcgcatatagttatagacaatcgtgaatttcttgttgatgatggcagcgcccgattctccggctgccgtcatcatattgtcccagtaggcctgcgtatgtgtgacgtacatggctatattttccacaaaatcctcgttggactggctcatggcataagccgtcacgaaaccgtcggaccaggccacatcgtccgtgcggggcatggcaccctgggcggtcatgtagtaataccagtcggctcccacgtattttccttccgagatgcggttgaaagaagggtcgaaattccgtttctgatgcaggatatgggcaaattcatgatgcatcgtttcaaaataatactcgttgagcttttcgatattgttcttctttatgttgaggtcgttcacgttatagagggtgattttcttcccgccttctgccgtgccgagcaccatgttaccgctactttcgtaggcgggcgatccgatgaggtggaatgtcttgggtacgtagacacggagaaaatccattcctgccagttcgacgtaagcgtccatccagacgtgtttgatgattttcgacagtgccaccgctttgtcatagtcggcgggcacgaggttgtatttatgatcgctctcgatatccttcatgcggtacatgaagtcgatgttataaggataggtgtagttgtcgagcagccagtaatcgaaagcatttctctccagaggttcggtagagaagatgctgttcgcggtgtctatctcgtcgttattgttgcaagcccccaggcagactgtggtgagagcaagcaaagagtaaatgatctgtttcttcataattttcacttttttctctgttagtttcttctcgggttaggttgcattcccgccacgatcacgtttcgcggaatctggatggcacggcgcaggtcgttcggcggcatttcgtcggtgacacgttgagtagccatgttgcgacggtaaatcataataccgtaccgtttgatatcgggccagcgcatcccctcgtgcagggtagtgacacggcgtatgtgcagaatacagtgaagaatattttcctgcatcccttcctcgatagtgaaatcgggagctagctgtttcttgggcgtctgttgcgtgaaaggcgtgtagaaattcattttatcataatacgcattgatctggtcgggtgtcagggccgatttgttgcgggtgtaggcacgttgccagctcgtgatgtcggcagccgactgggggtacattttcttcaacgcgtatgcttcggcacggcaaagcagggtttcgtccgttgaaaacaataccggcatataataaaggtagccgccatcataaagtccgctcttgcgcaggatgctggctacaaatccggtggtagagaaaggtttcagatacaaataatccgagctgccccacagtcctgcagaaagacaggtttcgctggtggcgagcgtttggttgtggaagtaacgcgggcctaccaggtagtcgcttccgagtgcgccccagttggagacggtgctgcttatcagcaggttcgcctcattggaagaagcaatatacgcatctgcctgcacatttccgttcacggaaagattgctcaatgcttcccagtcgcggagcaggtcgtcggggttgctgcccaacacacgggtggcaaagtcaatcacccggtcgcagttggagaaatcgggtttcatataataaaggtagaaacgggcggcaaaggcataggcggccttgcgggtgaaatggtatttggggacggaatatccgtcgtccgaaatcagttccactccctccaggaggtcacgctccactttccggtacacttcttccagcgtgccgcgctcgtaacggggagacacggtggtttccacgtcttccatataggggattcccaacgattcggaggcatgagtgtcataagcattgcagaagatagttgccagcatgaaatggcagtaggcacggcacaccagtgcttcaccgcgctgcgggttgagcgatgccggatttcctttctcctctatcgccttgagtgccatgttggcggctgaaattgcaccgtaataacctccccaaagggaattgggtgtgtcctgatattcctctttggtatcttcccagttgtaacattccttttcggaaagctggtagtaaccgtaggtggggccgctatcatcggagttgtcgctgtagagttcgaacagttcgttgggcgatacgtcgggataggccgatacaagcagtttggctattttctggtcggtgttcagttccgtgcggttgtccggtgttttgtccagaaaatcattgcaggaaacggtagtcagaccggaagctgcggtgagcagcagcacagggagtatatggtttattttcgtcttcatctatcgtatattttttcgggttctctattgggggttacaatcacagtcccagacgcagggtgagggtaaactgacgcggaacgggggatgccacccctccggtgttcacaaattcggggtcctgcccgttcaacttcttgtcggcgtagatcaggaagaggttggtagcctgcaacttgagcgacaggttggatattttggcaggagcgatccagcttctcgggaactcatacatcagtgatatttctttcatgcggataaaatcgcctttggcgatgcgctccgtagaatagttgtaggcgttgtaggcaagataaagcgatgtattcgtcctatattgcgggtcgctaagtatcaccgggatattcgttctcgcttcgtcgccggaaacagtccagcggtttttgaattcacgcggcatggcggtaaggtcggaatatttgtagttgaacaccgggttgaggcggactacgttgccgaaagagtaagtcataaagacatttagtttgaagcctttataggtgaatacattaccgaaacttcccgtgacggtgggatcggtaggaccttcgtatttcaggtaatccagtttttcgcgttcctggaagttgatgctggtgctagtcacttttccgtcgatgaggtattgcggaataccgtcttcatcaagtcccgcaaaagggatggagaagagtccgcgcacggggtatccttcgcgggcaaagccgttgccggaaacgagttccatcatacttgtgagtcctttcagctgggtgacttcgttcttggcataggagaagataaagtctgtgttccatgaaaaatcattcgtgcggatgttgcgggtggagagcgtaaattccacaccgtgagatttcatggtggctacgttggcatatttgttgatgacgccgcctactccctgtgtggggactacaccgatcaggtcgtagttgttacgctggtaccagtcggcggagaagttgatgcgattttcgagcaggccgaggtcgatgccgatgttcagctcatgctttttctcgtaagtgagttcgctgttctcgatgtcatcgatataaagtcccgtttcctgaatgtcggtaaaggggcggtagggcgagaagctgcggatgatggcttgcgagttggtcacttccgccgggccgcggtcggcggtgagggagtatgaggctttcagtgtcaggttggaaagggtgggttgcagcgctttgaagaaagattcttcatgcacgttccaggcaccggacaggttccatgtgggtagccagcgggatgaacggctgcgtcccatgcggttggttccttcatagcggaaagtgccgttgagagtgtagcgtccgtcgtaagaatacgtggcgttgaagaagctggctatactccgggtttcggagtgtcccaggctgtaatagcgcgaaccggattcgatgccgttcttaaagaactggtagatgtaggacggaatttcccccatcgaatattgcattccccagccttggaaagaggaatatgttttttgaaggctgttcacttccattccggcaaagaagttggtgatgtgcttttcggcgaaaagatgattccatgagagtgttccacggaaatcgagtcccagcatacggcggtcctgacgctggtagataccgccttcgggcagcagggtgataggcagggcgtatgggttgtcggggtcggtatagagcaatttgttttgctcgcggatggtggcgtcgtccataccggtgcggtaggcgattgcctgattggcgtcgtcgagcacgttgtgttcctgcgatgaagtctggtatctaacggctccgagggcactcaattcgagtccctgaatcactttccacttcatctcgccttgaaatttcacatcgaccatattgatttcgatgtagttattgtcgagttcgtggagaatattgaatggggcgtagttgctgatatagtccacagaggggtcgagtgtgcggcttgtgttgagcgcgtatgaataagggttgatgtcgaatccgcgggacatctttcctgatgcgatgtcgagggtggagttcatcgttcccggcgcgttctgctggcggtaggaggcgttggatatgaggttgagcgacagatttttatatatattataggttgtgttcacattggccgtgtagcgtttcaccttgctctgcttgtaccaacccggatcgagcatggcactcaaggaggcatagaaagaggatttttccgttccggcggtgatgctgacggaatggttctgcgaaacggcattggtgaaaagcacgtcgaaccagtcagtgttgcgcatttccgcttcgcggaggtaagcgttacgggcttcggtggtgttgagcagtccgcgttggccgttactgttgttgtattcgtcgatgaggcggtacatacgaccgtacactccggtgtctctggtgcggaaaaggtcggcactgttcaaccagcctttctgttccatttctttgtagattcccatctgttcctgcgaattcatgatattgaattctttgtagctggggatagcacgggtggtgaactcgcccgtataactgatcttgctgactccggcacgtcctttcttagtggtgactacgataacgcctgccatcgcacgtgcaccgtaaatggaggttgccgaaccgtctttcaaaatttggaaactctcgatatcgtcggaattcagtccggctatggcggaactaatcagtgtctcggcatcaccggaggaaagatcatcgggacctacgtctatggcgtcttccagaatcacgccgtcaacaacccacaacggtttggaacttccgtaaatggaagtggctccacgcacacgaatcttgggggcagttccaaaagtgcccgaaacattctgaacggaaactcctgccgcacgaccttccagtccgcgactaatgtcgggcaaaccgtccagcttcacattatcggcatttaattgtttggtggctccggtaaaaagacgtttatccattttctgcataccggtcactaccacttcctgtaatacttcggaatcggatttcatcattaccttgatggtcccggacttgatgggaacatcctgcgacttcatgccgacataggtgatttgcaaagttcttgatgaactcatgcattttctgcccctccttccataagtgcttgagcacaaaatatttaataaatataaaaaagaaaatacagaaaggggaataagaaaagcaaaaaaggaagtgaaacgcaaaataaatcgtccttttttgctttttatctacttactgaaaaggtagaaaatatctttcatgtagcaaacttcaagtccggcagcaactctcgtctccccaattagggtattaatataagagactacggatagaatttctttctttgtccaataaactatcttttttctacctgcaattatttatttgcagattattatgtgttattaaacatcttatctacgaatttatccacatttatttatcaaaaagatacttattttcgtttattaatcaccaaaaagaaataagaaaccgcctttcatgtacttatcttgtatttaagtccttttgctacaagtattttgtatcgacagcacaaattcatatttttttcatatttttctttgtttttctaaaaaagtggttacttttgcgaatcgtaagatagcaaaacagactattctactatataaaaactatatgaaaagaaaactaacgctgttattaacctgcctgctagcaggcattagcctggcaatcgctcaaacctccagaaaggtaatgggcgttgtcttctccgaggaagacaaccagcccgtcataggagcatccgttttagttaaaggtacatctataggaaccaccaccgacctcgatggaaagttcgttatcaataatgtaccaagttcatcaagaacttggtaattcccctcccgctttcctctattttccatcttttttcttcacctttccttccttttcaccagtctccaggaacagtgttttatcgtcatgaaactgaatatctatacgaatatgatgactatcatcaactgtatagcctacatccgcagaatctcctagaaaaagcttcagaatccagcacaacacctccggaatattgacaataatcgttgcctttccaatcacacaagagaaaaaattaaagatagttgtccaatttggtataggactccgaccgtcgaaattacacctgtacacacgccccacggacgaacgcgaacaatccgaattcttttcaacatatttttctggaatattattcagttgccccaacttaaaaacacaatcaattactttcttcttaacatcatcgtcgctgtgacgtacaccggtcatttctttctgaccattttcactgttaaaaaccacttctctttctaccttagtcatttttttacattttatttaatatttacatataaaattcacgacaaaagtacaatgcttattttaacatatatgttcaagcatgacacattctatatttttcatccatattttcacaaagaaagagggtttggggtacccattttctaccttaccggtattatcaagaaaatagatgaaataaaatctgccaaagaggaaagaaatcactcgttccaaaagctgtgatttgcgctaaaaaagagaaagcattcctgcactaaaagtttcaacgtttcattatggttcaagcttggacagcctttgcattacctgctctctacctttgtccccataatcaaatcattaaaacgaatcaaaatgactgaaactgaaaaaaatcattccttccaacgggtacagctaatgaagcaagctgccgtcatccggcaaaacaacggtatgaaccggcacgatgcactcgtcacggctcaccggataggggctctcatccggcagatgcatcacggaaatgtctgtttccgctacaccaaacaggatggaaccatccgacatgccaccggcaccctcaccggatatgaacatagtttccaccgtccgtatctacccaaaccggaaaatacgttcgttgtctactatgatatcgaagccaaaggctggcgcacctttcacgctgaaaattttctggatatcgaaacggacgggcaagacagcaacaagtaaaaatgaatttgcaaaagaacggaatgaacgggcaggaacgaaaagaatgggaggcgctttgcagacagtataacgtagattcgctatacgaggccattcaaggctgccgggaagaactggagtttctgattcattgtgccgaacggctcgaacctcatacggaggaggaggaagaaacgccgtttaacacatacagaccacagcgtttctccgcaccagaaagcgccgtttaacagatggaggaaacgccgtttctccccgcatgattcagaaaaacgattattttttaacagagtataattttattaacattatcaatatcaagtatggaaaattggagatttattgaagaaaaccccgactatatgatttcagatcacggacgggtattgagtttcaagggcagatcaaagttgatcctttgtgccaaaatcatggggaccggttacgaaactgtcatactgccgaataaaggtgtttgtatcgaatacaaaattcatcgtttggttgccaaagcattcatccccaacccggagcagctgccacagattaaccacctcgatggcaatacgatgaacaaccacgtgtcaaacctcgaatggtgcgatgcatacaccaatatgatgcacgccatccggacgggattacgacgtacgggagtgggatctcatcaaacacctttcgccgttacggatgcaacggggaaagtattgcgtgcctacccgtctatgaaagaaatggtcagagaggaacgtctgaagcctgcgcaccgaaactggcttatcctccaactaaagcatccggaccgcgtgaaacaacacgccttgcgtgtgcaacatcatcggggagatgcttttattatggttcagacaaggcctaaccagaccacagtgcttaatcggacgacaatacctaatcggcccaccatgcctaatcaaacgacaacgccgccgatggatgctcccttctctccggtgctccattcagtaacaaagcaatattaccgccaactgtccaaagaggaggctattgcgttcggggttatctcacgtgccgtctgcaaacaggaaaggaggattctgccatgaaagacacgatcatcatccactgttccgccactcgtgcgggacaggattttaccgctaccgacatcgaccgctggcatcgtcaacgtggttttcgttctatcggttatcatttcgtcatccgtctcgacggtacgatagaaccgggaagagatgttgctctcgacggagcgcattgtacaggttggaaccatcggtctatcggcatctgctacattggcggattggacaggaacggccggcctgccgacacacgaacggaagcgcaacgtgaagcgctcgtccggctggtagaagatttgcgccttgtcttcccttctctgaagcaggtgatagggcatcgggacaccagtcctgacctcaatggagacggcattatctcacctgacgagtatataaaatcttgcccctgcttcgatgtaaaagcagaatttattcagtaataatcaaccatttacaaccagcattttatcatcatggcccgcatttccaaacccggattagattatttccccctcgatgtcaattttctgcaggacagaaaagtacgccgcatctcctgtcgccaccacgcggcagggattgccgcactcacttcgctgctctgcctcatctataaagaaaaaggttattatattttgtggaacaaagacactcttttcgacatcgcccaggaagcgtgttgcggggaggaggaaatgcaggccatcattgatgattgcctgtcagtggggctgttcgatgatcttatatataaggagtatggcgtactgacttcacaggcgattcaggaacaatatcataaaatcatcaccgacagccggagaaaatataaattacccctggaacatttctggattatcaaggaggagagtagtgaaatagaaccggaaaatacggatgactccggcaaagatgttacaaaaccccatgaatttgctacaacaatgccacaaacaaaagaagaaacggatacagatatcaaaggtaaacaggaaaggaatatggaaaatgaaatcaaacctgaaataaaaaaagacatagagacagagagggaaggaaaagacggaaaggagaatgagaggagcatgccgcccgttccgtcaaacagcgtttttcaggcttcgcctgtcgttgtagagggtttgtctttggataaatcgattggaaaagaaacggtttcggaagggatgcaagcgggaggaggctcggaagctatacttctacttaatatgcaaactatcggcatccggaacgaacagaccgtaaaagcgattgtcgcccttgcccgacgtaaagaattgggaggccccggcggtattttatggaaaattcttagttcccaataccgccctaccctactcaaaaagaatgaaccgggtgattacattctttgggcactcaatcatccgacggaatttgaaaacacctacaacgggacactgaaaaagctaatcaggggaagataaagcggaaaagtctgcctataaacaaggaaccttttatttttactgcaaaagggatggaaaaccaagaattatcgtacctttgtagtacgaagaaaaagcctcttttttatgtataaagagaaacgtctctttgcaaaacataaaaagaagcgacccaaaacaatgagtaaatttatcaatccgttcaccgactacggattcaaactaatattcggcagagaagtgtctaaggatttactaatcgaatttctgaacgacctgctcgaaggtgaacgagtgataacggacttacagtttttgaataatgagcaattgccgctctatccggaaggacgaggtattatctatgatgtatattgcaccacggacacaggcgaaaaaatcatcgttgaaatgcagaaccgtatgcaaagcaacttcaaagaacgctcgatttattatttatcgcgtgccatcatcaatcaaggaagggtaggcaatgaatggaagtttgaaataaaagccgtatacggagttttcttgatgaatttcattatcgacaagaacataaaactccgcacagatgttattctaagtgacagggaaacaggagaactcttctcggataagttccgggaaatctttatcgccctccctctcttcaacaaaaacgaagaggaatgcgaaacgaattttgaacgttggatttatatattaaataatatggaaactttaaaacgcatgccgttcaaggcacgaaaagctgtcttcgagaaattggaagatatcgctgatgtggcttctatgtctccggaagacagggagcgatacgacaatagcgtcaaagtgtaccgagattatttggtgacaatggatgcagctgaacaaaaaggtgcacaagaaacccagctgaaaatagcccggaacatgaaagccaaagggatagacaatgagtctatcgccgaatgtaccgatttacctttaagcataatcgaagggttataaagtaatcggattcataaaggcactatgttgtaaccaaccgtttacgaacgaagaaaataaaaagaggtgagctccctttgcagggtagtccacctctttctcttcatacacaaacattcaaattatcaggtttcaggtgttcgtcaatataacggataccgtccatcttaaaaagcccccgcagaagcgtatagttcaacatacgctgtaccaggtacggggtgccttgcaagctgctctggtagatgacctcctgcaaatccggtgcaaaacggtcgggatcgactccgggaagcagataaccgcaaatcttacaatgcgtcaagacatcaatcaactgctgcaaccagaaagcctcctcccgctcgaaagcagcacggtattccctgtcggcagcaatatccatcagcaacttcttccccagcgaatgaagcagggtgagatagccatccactgtgatgaaaagtgcctccatgcacgagctgtccatccgtatctgtttttgctggatccggcttctgattccgttggcaaaatcagaaagacagacacggaacagactcgttttgctgggaaagagcttgtagagtgtccgcttcgacatcttcattcccctggctatatcatccatcgtcaacccgtcggcaccatgctggtacatttcccgcttggtgtagtcgagtatccggcaacgcagtgtttctggattcatacatacctccctacatacggccgccacccaatgcctgatacaaagtgattacgccctggatttcagtaaagcggttcgccacttgtgacagttgcgcgttgagcaacgtctgttgggcggtcaatacttccagataagtggtgttgccatgtttcatcaacaggcttgtgctcttggctgctgtttgcagggaagccacctgcttgttgtagtagtcggctttctcgcgggcagtctggtactgcaccagtgcctcgttcacttccacgcctgcgttcagcaaggtctgttcgaaactaaggcgggcttcctcctgttgggctttcgctattttcagttgggcgatgttcgctcctttattaaacaaaggctgcgtcagggaagccacggcggaggccaggaacttacccgggttgacaatcatgctccctgcactgttggtccatcctgcactgccgctcaacgtgatggaaggatagaaagcggcacgggcggcattcgtggtatagaaagcctgtgccaacgaaaattctgcgctacgcacgtcaggacggttggcaagcatctgtaagggaacacccacggagaagttttccggcaactgttgatttcccaatttgccacgctgtattttgtgaggagtttctgccagtaaaagtgccagtgaattttccgcctgattgatttgctctttcaggtcgagtacggtggtacatatattgaagtaggtagcctccgtctgcgccagtccggcctcattcaccatcccggcctttttcatggcacgggtggcatttacactttctttccaggcagcttcggtagccacagctatctcatactgcgaatcgagcatcagcaaggtgtaatacgtattggcaacggatgctaccaactgcgtcttgacagcctgttcatattccttgctctgttcgtaggcagctttcgcacgacgctttgctgttgtcacctttccaaaaatatccagttcccacgaagcagtcacgggcagcgaataagtttgtgtagcctttccacggtcgaagctgctggcagctccttccggtgccagaaacaaagaaggcagataagacagtttggacgtcaacagcgtggcttccgcttctttcacacgcaaatgggcagtctgcatatcggtgttgcgcaagagtgccgaatccaccaaattctgcagataagggtcggtaaagacctcccgccacgagaggttaccgaagtttgccgtatcggtggcagcaacagactcgctgccgtaaagtccttcgggaacttccgataccggtttgtatttattgtagataccgcaactactcaatataagcgttgctgcggacagaatgattatttttctcattagttcttattttaattcaggtctaaaacctttaatcatcaattattcttttccagctttagatttttcttcctcgctcactttgatttcttcttcaatctgccagtcatgcgtcgggacgctctgcacgggacgcaaacgttcctgcaaccactggaaagcaataaacaaagtaggcacgatgaagagcaacgccaacgtaccgatggtcataccacctactacacccgtacccaatgaacggttaccgttggctcccactccacttgacatcatcaacgggaacagaccgaaaatcatcgtcaatgccgtcatcagaatcggacgcagacgggctttagccgcactgaccgcagaagcaatcagccccatacctgctttacgacgttcggcagcatattccgtcagcaaaatagccgtcttcgccagcagaccgatcaacataatcaaacctgtttgcagataaatattattctccagtccgaacatccaggcgaaaaggaagctacccatcaatccgcaaggcacactcaaaagcacagcgaacggaataatgaagctctcataaagcgcactcaaaataaggtaaatcatcaggaagcagataccgaaaataatgatcgtcgtaccgctctgctggttttcctcacgggtgatacctccgtaatcatagccatagcctttcggaagagactgttcggcagtttcctgcacagccttgatggcgtctcccgtactatatccgtcggccggcatcgcatttaccgcaatggagttatacatattgaaacggctcaacgattccgcaccgtagctacgggtcagcgtaacgaactggctcaatggcgccatctctccattcgacatacgcacaaaagcattatcgagggaagtttcgtccaaacggaacaccggatcggcctgaatcatgacacggtacactttagagaaacggttgaaattggacacatactgcccaccgtaataaccggacagcgtactcaacacagcgtcgggcgtgatacctgcacgcttacatttagccgcatccacctctaccgtccactgcggatagcgaacgtcgaacgtcgaataagccatcgatatttcaggccgctggttcaaagctcccaagtattgctgggtggtggtgaagaactcgttcatatcaccgcccatcttatcctgcatgtggagttcgagcgcattacccataccgtaacccggaatcatacccggagagatggcgaacacactggcatccttgatatcagccgtacgcgcatatacctgaccgatcaccgactgcacattgtcctcatcacccggacgttcgtcccacggtttcagtttgagaatcaacataccgaacgaactaccctgtcctgccaacaatccgtaaccggccactttctgcacgtgtttcagttgaggtatttctatcaggcgtttttcgatacgttccatcaccttatccgtcgttgtcagcgaactgcctgccgctgtactcacattgacgaaaataacaccctgatcctcgtcgggtaccagactggtcttcgtgttattcatcagtaacacaagcaataccacggaacaagccagcaacgaccatgtcaaccatctgcgcttgataaagaacaatacaatcgtcttatatttatccaccatcatatcgaaagccgaattgaaagccttacggaagcgtgccgcaaagttgttcttctgcgttccgtcttcattaatataaggtttcagcagcaatgcacacaaagccggactcaaagtcaacgcgttaatagcggagatacctaccgcaaccgccatcgtcaaaccgaactgggtatagaacgtaccggaagtgccgcccatgaaggacaccggaatgaacaccgccataaataccagcgaagaggtgataacggcattactgatacctttcatagcgtcgatacttgccatatatgacgacctgtagcccacatcgaaccgcgcctgcaccgcctcgacgacaataatggcatcatccaccaccgtaccgataacgagcactagcgcaaacagggtcagcaagttgatactgaatccggctatcgccatgaaagcaaacgtacccaccagggaaaccacaattccgaccagcggaatcaatgtagaacggaagtcctgcaagaagacgtacaccacaaggataaccagaatgatagcctcgatcaacgttttcaccacctcatgaatggaagcgaacaggaagtcgttggagctcatcatctgcgtcagttccacgcctttcggaaggtctttgcttgcctcttcgaggagtttgtcgatattctggtttacttcggtcgcattggaacctgccgtctggaacaccatacaggatacacccggatgaccgtccataccaccgtggtaagcgtagctgtcctgtcccagttggatatcggcaacgtctttcagtttcaagacttcgccattgtcggtggaacggatgacgatatccccgaattcttcgggagtaatgagacgtccggtgtacttcatcgtatactgataagtctcatcggaattttcaccgaacgaaccggtagccgattcgatattctgctcggcaagcacaccggtgatatcggacggaatcagtttgtactgcgccatcacgtccggtttcatccatacacgcatactatattcaccgcccataatcatcaggtcgcccacaccggagatacgaagaatctgcggtttcaggttgatgctgatatagttggacaggaagttctcgtcgtaactgtcgtccggactatacaatgagaacatctgcagaatactcgtctgacgcttggaagtggtcacaccgacctgggttacctccgccggaagctgtcccgtagcacgtgatacacggttctgcacgttgacagccgccatatcggggtctgtgccctgcttaaaatagacggtgatgctcaccgaaccggaattggtggcggaggaagtcatgtaggtcatgtcttccactccgttgatcgcctcttccaaaggcgcaataacactcttctgcaatgtttccgcactggcgccataataggtggtactcaccataatggtaggcggagcaatatcgggatactgctcaacgggcaagctgaacagcccgatgatacccactacgacaatcgtgatagagatgactgccgataatacggggcgttctataaaggttcttaaattcatgaatgattcctccttggtttaattttcagtagtagttgccggagacttcgttgttgtctctgttgatgaggattgattagcatttgtcactcctgccactggagtttgagcagcctttgccttgaccggagtaccttcacgaagcaaacctactccttctgccacgatcacatctcccggtgccaatccttcatctacaataaattcccgaccgccattgacacgggtcacttgtacctggctggattgagccttgccgtccactaccttatagacatatctcttatcttgtatttcgaaagtggcagcctgtggaatggtcagcgcagctgttttttgaacaggaacaatcacattacccgcaccaccgctatgcagcaatccttccttgttcgggaaaactgcacgcaggctgaccgtacccgtcgaacggtcgatcactccgctgatagattcaatctgtccccgttcggagtaggctgacttatcgttcagttgcaggtcgatggcaggcatatttttcaatgcttcctctttagaaccgtattggcggatcagtcccagtaattggttttccgtcatggagaagtagacgtacatatccgaattgtcggaaacggtagtcaacggctgggcaagagcggaactaaccaaagctcctacacggtaaggcaacgtgcctaccactccgtcggccggacttttcacaaccgtataagaaagattattgcgggcactcacttcctgcgccttggcctgtgccaactgtgctttggcagccaacagggagttttttgccgtactcaaatcgaaagaggaaattacgttctctttatacagttcctctttactgtcatacgtcagttgcgctgtagccagagaggccttggccgattcaacgtttgccactgccgtctgcaaagcagcttcatacggcacttggtcgatgatgaacaatgtctgtccgttctttacacgctgcccttccgttacacagactttagtcagcgtaccacttacctgggggtaaatatcaatatcctgacgtccgcggatggtcgccgagtaggcgcttgaaatcatccggtcggccggagaaacggtcatcacttcgtattctgtttccatttgtgccggaggagcttgtttacagcccgtagcagctaccatacagcagagcaacaatagcccttgcttcactttacatacctttttactcattttctgttacctatttaactatttttgaacacggcaaaggtagactgttttcttcataggaaactggacttagtatcttcagttttgttcattttaggaacattaaaaccgatatttagtgaaaaagtcctatttttgtacccaaaataagaacaacaatggaatcaaaaaactctagcctagccatacttcatgaaccgttcgttgccggaatggacgaaaacctgtctccaattatgcaacgcctgtggaaactggaagggggtgccatctatttttgcagaagcggatgggcacacgtcacaatcgacctgaaagactatgaaatagtagaaaacactcaaatcgtgctcttgccgggaacgattatccgcatcaatggcaacagcagcgatttcacagcttctttcttcggatttcccaaagaaatgtttcgcgaagcctgcctccgtttcgagccgatcttcttccggttcatcaaagaaaaaccgtgctatacactcaaggatgaaagcacaggagcaatcaacgggttaatgcgtgccacaacagctatatacaacgatcgtgaaaaccgtttccgcaaccagatcgccaaaaatcatctccagtcgtttatgctggatatttatgataagtgttaccgctacttcgaccgacaggaaatcgaaggaggaagccggcaggatgaaatctttaagaatttcatcgcactggtacatgaaaactgtatctcacaacgggaagtgactttctacgccagcaaactgtgtatctccaccaaatacctgacaggtatttgcaaaagcgtgacgggcgaggctgccaaaaagattatcgacgactttgccatcctggagataaaagtgttgcttcaatccaccggactgacgattcaggaaatagccgaccgacttggttttcccgatcagtcgtatttaggaaggtacttcaaacggcacgagggaatgtcgccgaaagagtatcagagtaagtattctatctaatcaagtaaaataatcttttattattagattattaggcacggattacgcggttcttttattaactaaaaccgtgtaatccgtgcctccatttattttattaatttgtatttatcgcacaacacagattgttaacagatctgtaatactatcttaatctgccttgcattcctttgcaccgtgaaacaaaaacacgggtgtgaataactttatttcatttaataaattaaaagaagcaaggtaaaagattatgaaaagaaacaaatggctgctttctctgtcgattgggctcttgtgctgtggctctgcatacgcacagacaacagtgaaaggaaaaatcacaagtgaaggcggggaaccgttaatcggggctaccgtagctgtgaaaaactcgacagacggcacggtgaccgacatcgacggaaactactccctgaagactaagaaaacattgactcaaaaggatttgcttgtattcagttatgtgggatataaaacgctacagaagaactatgcaggcaatacgatgaacgtaaaactggcggaagagtcgcaacaactgaatgatgtggtggtgactgccctggggatcaaacgtgaagaaaaaggattgggatatgccacggaaaccgtgaaaggggatatgattacgagtgccctgcccaccaactggtcgacggcactgaacggcaaggtagccggattgagtgttatctcttccggtggtccgcttaattcgagccgtatctcgctgcggggggacgtctcgctgaaccagaacggaaacgacgcattggtggtagtggacggtgtaccgatgagtagtccgatgaccaatccgggtgttgcctacggtgcaggttcaaacagcgaactttccgtggactatggtaacggattctccgacatcaatccggatgatatcgaaagcatccaagtattaaaaggggccagtgcgacagccttgtacggtacgcgtgcagccaatggcgtgattatggtgactaccaaatcgggagcgggtgcacccaaaggtatcggtgtgtcttacagcggtaacttcagtattgacgatgtgatgagatggcccgattaccagtatgaattcggacagggattgccgagcaatatcggtccggcaggttctatctacgaaggccagccctattactcttacgggaaagcggaagacggcagttacgcaagcactagcggaaccagtagcgcctacggagcacgtttcgacgccaacaggttgttctaccaatatgaccccgtaacgcagggacgcgcttctgttgccaccccttgggtagcgtacaaaaacaaccgcaaagatttgttccagacaggatacaccctgaccaactcggtagccttgaccggaaaatccgaccggggcagcgtacgggcgtccatcacccacactaagaacgaatggattctccccaatacaggtttccagcgtatcaccgccatggtttccgcccaacagcagatttcgagggcactgcgcattaatttcaagtcgagttatacgtaccgcaagctcaacaacacgcctgcactgggatataacagtaactctatctcctacttccttatcttccagaatccgaatgtcaacctcgactggttgcgtccgatgtggcgtaccggacaggaaaatgtgaaacagctccaaccgtacagttcctttatcggaaacccgtatgtcattctatacgaatctgaaaatccttcggagaaacacagtaatgtatcatccatttctgccaatctgcgcatcaacagtaaattcgatttcatgatccggtccggtatccagttgtcagccgaccaacgcgaacagcatcgtcctatcagtgacgtggttttcggaaacgggtttttcaagaaacagaatgtgttcgattatgaattaaacagcgatgctttatttacttaccatgattcattcgccaacggattgcgtgtcaacgcttcggcaggtggaaacatgatgcaacaaagctacgatatgttggctgcctcggtggtaggattgattacgccgggagtatacaaactggcaaacggtgtttccaacccgaacgtgcagacggttatcaaaaagaaagcgctgaacagtctttatttcacggccaatttctcgtataaggataaactgtttctcgatgtcaccgggcgcaatgactggtcgtctaccctgccgaaaagtaaccgttctttcttctatccgtcggtcagcgtcagtgcagtgatgaacgagtggttcacgttgccggaacagatcagtctgttgaaagtgagaggttcgctggcacaggtgggcaatgacacagacccttacaagacatcgccctattatggcacgagcgatttccccggatcggccatcgtatcttctacgctctataatcaggatttcaaaccggagatttcgaccaattacgaaacgggattcgacttccgtatgtttcacaaccgcatcggactcgatttcacattctattataaccgcaccaaaaaccagattctggatgctccgatggacccgaccacaggttacagcaaagctaccatcaattcgggatgcgtccgcaaccgcggttacgaaatccagttggacgttactccggtagtcagcagggatttccgatggaatgctactttcacctggtctaagaacgagaaccggattctctcactggcggaaggggcggatgagaaccagttaatcagcagtatcggtagtgtgtctatcatcggacgtgtgggtggaactacgggcgatctctggggatataaactggtacgcgacccggaaggaaatgtggtcatcaacgacaacggattgcccgaacgttcgggagagatcgaatacgtcggcacggcctatccgaaatggaaagccggactgtacaatgaattttcttacaagaacttcacgcttagcgtcctgctcgacggacaggtgggaggtaaaatgtactcgcactcgcaccacaaaatgacggaacagggaaaactgcaacataccctgaacggacgtctgccgggaacggaattttatatgtcgaaagacgacccgcgcatcgctgccgccggactttcaccacaagacgggatgtacatgattgctccgggaacagtgaagaacgatgacggaacttactcgccaaacaccaaagtggtgaccgtggaaagttattataaggaatattaccggatggccaatgtggaaactaacacgttcgacacttcattcctcaagttgcgcgaaatgagactggagtacaagttgccgaacagcacactgaagaaaacaccgttcagcaaagcatcggtggcactctacgcacgcaacctgttctgtatcactgactatcctctgttcgaccccgaatctgccgccctcaacggaagttcgatggtgaccggtgtggagacgggctcactgcctacggcacgtactttcggactgaatattaacgtatctttttaaacactgacttatgaaaaccaataaacttttcaaaaatatagtatggggaatgactttgtgcggagctctctgcacgacttcctgcaccagcttcgacgaactcaatacagaccccacccgcatggatgaggtgaatcccggcacgctgctcaacccgattttatacgaaacatcggtctacaactggaaacgctacaacagctatacctacgacctgatgcaatgcgccgtatctaccagcagcaccaacggtgtgggatggtggtatatgacggacagcgaaggagacggcacatggactacttattataaatggatcaacaacgccaaagagatgatgcgcctcaccggaaaattgccggaagcctccaaacaacccaactacgatgctatatcgctgactttgcaatgttggttataccagattctgacggatgccttcggtgatattccgatgagcgaagcctgctccgccgacgagggaatacttgcaccgaagttcgacacccagcagcaggtgtaccaacagattatcgacaatctgaaaacagctaacgagttgttcgacaaagctaacgggttgatctacaaccaatcgggcgaaatgttgtacaagacgtccaaaggggatgcaaccggtattttgaaatggaagaagttctgcaactcgctccgtctgcgtgcactgctccgggtgatcgacgtgccggaattcaacgcgaaacaggagctgcgtaccatgctgaccgatcccgccacttatccggtattcgaatcgaacgatgatgctgccctgcttgccatcagcggaacttatccggaggaagctccgctcacccgtccacaggatttcacttcttatgttcagatttcagagttctttgttaatctgctgaaaggttggaacgatccccgtctgcaggtgtatgcaacacaggtcactctccccgaccagactaaagattatgtgggtttgcccagcggttatcagacgttgccttcaatcactgcttcgggactgaatcaggaaatggcgaaggcacctatgaaacttgccatgatgccttatgccgaagtggaattcatcaaagcggaattactgaaaaaaggagtgatcgacggaggaagtagcgctgccaaagaggcttatcagaagggagtgcaggcggctatcgaacagtggggacagaaaatgcctgaccattattttgaaaatccggaagctgcttatgatgatacgctggaacgaatcatgaaccagaagtttgtcgcactgttcttctgcgattatcagcagtggtttgaatataaccgtaccggttttcctgtgttacctgtggggcccggcatcgcaaatgctaataacaaaatgccgaaacgctttaaatatccatctgctctgcagcgtactaatctgaagaattatcaggcggctaaagcgaacatgggaggcgatgacttccatatccgactgatgtggcagcaataaatgaatgtgtcggtcaccaagattgcggcaataattatcatttcaatcaatctttaaaattcaatgaatatgaaaagaataatcagtatggctgttgtgttagttataacgatggcagcaacggcgcaaaaaggagagctcgccatgaacgagaatatctccggaaaaaaccatatttccaaaaacgaaaaagaagctactcccgtaggcaaaaagccgaaagcggtgtttatattcgacgtgtatggagaaatcccgactaccaaaccagtgtttgaagcggaacattatctggggagtgacattaccggaaaatggaatactttcatccagaattatacgcatgagtatgatgtaacaatcggatttacggattcttcggtcgaaattttgaagccttctatttacaaggcggttaataaggtgaataaatattataagaaggcattgaagaaagaagaggtgagccgggaagttgctacattcaacatgggtcatattctggattgcgccaatgtgatgtgtttcgatgataacagcaagtcttttgaggaggctctcaagtcggcagatgaaccggaagaaattatcgcattattcaatcaggttactttaagaaagttataagcaatgaaaaagatcaattttagaaaaacgctgtttgcagcggttttgcttttccagctgaacgctattgccgcctttggtcagacggtggtgaaaggtagtgtgaaagataatacaggtaaacccatcagcggtgtagtggtgacagacggggcacatttcaatacgactgatgcagaaggaaattatgttctgaacactgatccgacacgttatccaatggtttacatctctactccggcagcgtatgagcttccttccaaagagggggtagcagatggtttctatcaatatctggatgccgggaaaagcgaaaaccaatgtgacttcgtattgactaaacggcagaagccggtggatgaatttgtctacatcgtcctttccgacccgcaagtgagaaacgaaaagcaactggaccgcttccgcacggaaacagtgcccgatctgaaacagactgccgactcactaaagaacttcgaaatcatcggcatgggactgggggatctggtgtgggatgccatgaacctgtacgctccttaccggcaagcggtgtccaacttgggaatgacgatgttccaactgatgggaaaccacgacttcaacctgctctacaaatctataacgcagacggatcatccggcggatggttatggggaacagaattattatcagtcattcggcccggctaactattcattcaatatcggtaaagtgcatgtgatagcaatgaaggatattgattacgacggcaacaagaaatacacggaacgcttcacgccggaagatttggactggttgagaaaagatttaagttatgtgcctaaaggaaatatcgtgttcctgaacgttcacgctccagtagctaataacacggtagctgcggggggaaatgcgcgcaacgccaatgcgcttttccaactgttgaggccttaccaagtacatattttctccggacacacgcacttttatgaaaatcagttgcccgcccctaccatttacgaacataatatcggagcggcctgcggcgcatggtgggcaggacacgtgaatcgttgcggagcaccaaacggttatctggtggtacaagtgaaaggtgatgatgtgaaatggcgttacaaggcaacagggtgttcgccggactatcagttccggctttaccaaccgggagagtttgaaagccagaaagactatgtggtagccaatatctgggattgggactggacgtatacggtaaactggtacgaggatggagtgttgaaaggtgctatgcaggcttttgacgatgaggatcaggattatatcaatatggtaaagggaaagaaaacgggttatcgcacacgtcatcttttccgtgcacagccttctaaagatgcaaaatctgtcaaggtggtggttaagaatcgtttcggggagatattcacggaagagataaaactctagttttatttcggtctgtttatactggtagtaattataattatactggtagtaaattataaaagtcatgagggagtttaagctttaacttcctcatgacttttatttttgaaacaatctcactttaacggaaaatccggcacattgctactttcatcggtactttcctcatcgcccatagtgcacaaagcagggaacagatggcgcagaccacaaacgtaactccggtagatacaaggatatttcccaagccgaccaacggagaaacaatacctccggaagcaaaacagagtgctcccaacagggcggaagctgctccggcgtaacggcgttcgctatccatcgccaaggtggtggaggaagtaaaggtcagtcccattgtgaaaagtaatgcgaacatcagcagttcataggtccaaaagccgcatccgttatacaaggcaatcatcacacagacggacagacacaacataccgatgcatccggtcagcgtcccagtttcaggttggcggaatttcacggagatagctgctgccaccccgatagctaccgcattcaccgcgaagcaagcttcaccttacggtacatattatatcgcatctttacttcaggagtggttgtgcttctttctattctttctcctatttgatatgctagctgccattcgttaaaaaacattatatttgagcctatatagggttacaacttacttgttttttttcataattttgcaaaccaaaaatagaaaaataggtatcaagatgaaactaagatattatcaaatcgccattcgttacaagaacaaaatgcatgactttcacggttggggtgtagcagcgcagatttgataaccctcctattttcactacagagaacgccagaggacacagcgttcaaataatcttcattaacttgtgtcaactgacatatttcaaaagaaaaaaactctgtgttactctgtattattccgtggtgaagaaaattcaaaattctactattaattaaatttcttttcactttatgagcaaaaaaagatggctcatagtgccgctatgtgccgtgctatgcagtcagggactgtttgcccagacgcttgacaggagagtgttgggcattgacgaaatgttccgtctggcagacgagaacagtcagagtattcaaacgtataaaaccggaaaggaagcagccgatgaagctttgaaggctgccaagtcacaacgtttgccggacataggtgcctcactctcatttagttacctgggcgacggatatatatgggaccgtgacttcaaaaacgggcagaatatccctatgccacacttcggcaataactttgcgttggaagcgcaacaagtgatttacgccggaggagccatcaacagcagtattactctggctgaactcggtcagcaaatggctgcattggactggcagaagaaccgtcaggaaatccgctttctcctgaccggctattacctggatttatacaagttgaataaccagctgcaagtgttacagaagaatctggatttgacggaacaggtgatccgcaacatggaatcacgccgcacacagggaacggccttaaaaaatgacatcacccgctatgagctacagaaagagacgctgaaactgcaactggcaaaggtgcaggatgcccgcaaaataatgaatcaccaactggtgactaccctacatctgcctgccggaacagaaatcgttcccgattctaccttgctgaacgaggaagtgacagcattagccgaaaacgactggcaaatgatggccagtcaaagcaatgtcggactgcaacaagcccagctggctatgaaaatgaacgagcagaaagtgaaattggaacgctcggaactgcttccgaaaattgcacttgtggccggtgaacatttagatggtcctatcaccatcgaagtcccggtgctctacaataacttcaattactggtatgtgggggtcggtatcaaatacaatctttcttctttatttaaaaacaacaagaaagtgcgccaggcaaaactgaacgtccgcagagcacaggaggaatattcactggcacaggaacaaatagaaaacggtgtacaggcgaactacgtcaactttctcacctctttcacagacctgcgtacacaggagaaaagcgtggaacttgccgaccagaactataacgtaaccagcaaccgttataaaaacgaccttgccctgctcaccgatatgctcgatgccagcaatatgaaactaagtgccgacctcggtctggtcaatgcgcgtattaacttgatatacagttattacaaaatgaaatatatcacacacactctctaacagagaagtaatgacttatcaaaaagaatccaatttataacagaatcaaattctcatctctcttaaaatagaacagattatgatagctagaaaaacccagaagataatatacaacattgtaattatctgtttacttatcggtggtgtcacttatgtttgttcccggtttatccacttgggaaatatcgaatatacggataatgcgcaggtgaaacaacatatcacaccgatcaatacccgtgtaccgggattcatcaagaaaatctactttgacgagtatcagcaagtgcgcaaaggcgacacgcttcttatcatcgaagatgcggaattccgtctccgtgtggcacaggcagaagcggatttggcgaatgccaccgcaggacgccaggccactaccatcggtatcgccactacgcaaaacaatttaagtgtgagcgacgcaagtattgaagaagtacgtgtacagatggaaaatgccaaacgggaactgaaccgttttgagaaactgttgcaggaagacgcagtgacaaaacagcaatatgacaacgtacatacagcatacgaagctgccaaagcccgttatgaacaggtgtcacgggctaaaatgtctacttctctagtgaaaagtgagcagactcatcgcctgggacagaatgaagcaggtgtccgcctggcagaagctgcgttggaacttgcccgtctgaatctctcttatacagtcatcattgctccgtgtgacggcacgacaggaaagaaagaaatcctggaagggcaactggtgcaaccgggacagactatagttgatatcgtagacagcagtgatttgtgggtaatcgccaattaccgcgaaacccagcttccgaatatcaaagaaggtgcagaagtggaaataaccgcagacgccgtgccgaacgtcacattcaaaggagtagtagaatccatctccgatgcaacaggagccgccttctcaatgattccgcaagacaacgccaccggaaacttcgtgaaagtggagcaacgtattcccgtacgtatcagtctgaaaggaaacaaaccagaagatttgaaacgcatgcgtgccggttttaacgtggaatgtgaagtgaaatattaaccgctttaaccctttatcgttttaatcattgttttaattatcaattgctttaatttttaatttctaatctttaattcttatgagtgctcctgttctgaacggtccttttgttttgccgatgttccgcagcttcgtgccgcggaaaatgcaaccgtggatttatcttttcatagccgtcaccttccaactttcgggaggtgtctatttgggtgcattgaatcagatgatcggcagcatgtcactgatgcgggaggatattttgatgtgcatgtatgccaacctggccggtatggcaatctactttccgttactgttccgcatgaagttccgttttaccaataaaaccctgcttacatcggccgcactgggagtattactctgcaacctgatagcaccgcatatcacctttctccctctattgtggttggtctgcttcatcgaaggtatgtgcaaaatacagggaactttcgagtgtatgtcaaacattcagctgtggatgacccctaaacgggatttcaccgttttctttccctggcttcatattgtaattttgggaagcatccagctatctgacctacttacgacccgtctaatgtatcattatcactggacgtacatgaacctgttcgttgccggtctgatgctgattgtcttattgatacagttcacttgtgtgaagcatttccggttcatgcgtaaatttcctctgtttggtatcgactggctgggcgggatactatgggctgccttattagcggaaatcgccttcctcttcaactacggagactggtacgactggtggaacagcccggtcatccgccaacttaccatcgtgattttcatcactttaggaatttgtatttggcgcatgatgaccattcgacacccatttctcgaaccaaagatgtggacgtaccgccattttttgcctttattgggattagtcactttagtggaagcgttcctcgccacggagcacgtgctggaggaagtcttttacgaggaagtaatgaaatatgaagaactggtcagttcccaactcgattggcttgccattgtcggtatcgtatgcggttgtgtgttttcgtattggtggatgcacgtcaagcagtataattatgtacgcctggtcattgtcggctttatcgggttgatcggttacctgatcggtttctacctgactttatccaccgacatccatatttcacagctttacctgccgaccgtatgtcggggcttcgcttatgccatattgagtgctacttttatggtgtgtctggaggaaatcatgactttccagcatttcttccagggattaagtgtgttcaatatgctgcacatggtagtaggcggcgtagtgggagccgcagtctatgcacagggattggcgtattatgttcccgacaatctggcccgttacggttcagccatcgatcatgtagctttcagcagtagtccgttcaatctgggtcactatatggaagagtttatcagtcagatgatggagataagcatcaagcagatttacggctgggtggcttatgcctgcattttcctcttcctattgttattgctttacgatttcccggctcgacgctcactaaaaagtataccaagctggaaagaggtggcaagggaggtgaaaaatacgttctggcggacaacacacacgccgtcggagaaagaaaaataggaagactgtttacctgtatatttattgagctgataatcaatagagtttatgccatccggctacgaaaacaaactgccgtagctatccggcataaactctacctttttctaactagtcacttaccttctatatctttataaatagttgctttttgtacagcccccatacaatcagataattgaatccgataaacagaaggccgtaaatcagagaggccagatgagcatcgggaagaacgctccaaatggaagtgtaaatcttctcctgcaagctactctccccaactgtaattacctccagcaaagtagctaacacaccggccactatataaataaacaatggattcgtaccaaaaacatggaaaggatatccccatttctgctttttacgaatatcaatcagccaggtgagaaacacaagcaacaaggaagcaaaaccacaagtcaccagcacaaaagtcggactccatactttcttattcaacgggcagccgtaactcaacaaccatcctgtaaacaaaagagcaatacccagtatggagatctgcaacagccggtgatggatttcagtcttctcccgcaaaatatttccgcagaaataaccgataatcacttgcgcaatgcacggcaaggtactcaacaggccttccgggtcgaaaaagatacgcccgccatccggcaaccactcccgatacaaatgggcttctccgaatagtgtgcgatctgtaacggcaataatattctgttcggaaagttcaaatccgtgtcccaaagccagcaagatggaataacctgccagaatgatcccggagatccataccagatttgccggacgccggacacccacaatcagcaaggaaccaaagaaataagccaatgccaaccgctgcaacactcccagaatacgtatgtgcgagaaaggttgttctactcctgtgcacaccaacgagaaccaggaaagaaaaagtcccaacaaaaacaagatcaccgtgcgccgtaccagtttgatgataaaaccgcgactgaaatgatgatcgaaccgggataaggcaaaactcatggaaacgcccattataaacatgaagaacgggaagaccaaatcagtcggagtcagtccgttccattcggcatgtcgcaagggtgcgtaaatggattcccatgttccggggttgttcaccaaaatcattccgacaatggtgattccccggagtatatctaatgaaagtaaacgttctgatttcatattgttcttagtgtaccgggattaaagaaatcccggtttggtgaaatagaatccattcgcattcaaccatttaacatgccatttcaggcgattggtaaaatcaatccagttacggctacttccccacgccaactccgaaaatgcttgaagagagggaaacacgtgctggccaaacttccgttcattaggaatcatctccgtccatacacaagcctggaagcctaacacattttgcttcacgatgccgggaaactggggttcgaactcgaagttatacaaagagcttaatccttcgtctgaaggcgttgcactcaaatagaaacgggaccattccatgaatataatcggataacctttctgggtaatctttcccggctgatcgggcagccagtcacgccaataagtataaatcaaatcctgtggctctttttcaagaaaagcatcgtcccatcccatcactttcttgcctttacccttcacatagttcgtcataatcttcacaaaacggttttgcagttcatccactttctgataaccttcctgctgcatcaatcgctgacaaacttcacactgttcccagttatctttctccacttcatctgctccgatatggaaatattccgaagggaaaatctcgaccatctcatcaatgatggactgcacgaactgatagttctccggacgcgagggacagataggataagagaattcttctccccatccggcttctcccgtgcacgacaactcgggatagactttgatagccgccgagaaatgacctggcatgtcaatttcgggtacaatatcgatccctctttccaacgcataacttaccaaacctttcatctcttcctgcgtataatgaccaccatattgagaaccgtttctcacgaaacggggatctatctcatagttataatcctgttgggaaagttctacgcatctcttgtcatattcgtcaaagtcgcgccagctgccttcctgcgtcagcaacggatattttttcacttcaatgcgccaaccctgatcgtccgtcagatgcaagtgaagcttgtttatcttgtagaaagacaaacagtctatcacctttttcagataatcaaccgtaaacatgtggcggactacatcgatatgaaatccgcgccaatcatatttgggagcatcttttatatcgaccatcggaagatatttagcacttccggaagtgaagaaatttgcttgttcgagcgcttgtctcaatgtctggattccccagagaagtccggtttccgttgaataatagacgcaggctccctctttggtaacggtgagccggtaagcctctttagccagatccgcttcctgtttcacacggataaaggcacgatcgttggaggcatcactgacggaaagagaaagtttctcttccagggtggatttcaacagttgcgacgtggaagccggaatgttctggctgacagtcacattctgcggaagagagacaaccgattctttataatcgactctttccggcaaaggcatcaccgacaggcgggtgggcactcgctccgggtagttcgcgttatcattatcattgcacgacaacgatgtgatcgcacctattcccaacaagaataatattccggttctttttatcttatcatagttcataacttatctacttttgtggattaatctactttgagagtgcttgttacactctctttatttaaataaaacagtttcgctttcacaacggaagcatcacaggctacgggagctttccaaagttccgaacgaagggtcggttccgtgccatcggtcgtatagcgtatttcacctccccggataggggtactggcatggagttgcccttctttgatgcaaagtccgggatgaggtaaacggaaattgatacttcgggacgcccagtgaggcatttctttctcactcactttggagtagaacaggcccagttctttattgaaagcctgacgttctttctctcctgttaaagtgctccaggcgggaaaagcgttccaaccgcgttccaccaatccgaggattttggggaaggtgtaatattccacccattcaaaatcacggatggtttcagcaaataattgtgcctgcactccctggatatgttcctttccggaagcggtcaaagtcgtttttccctttcctgcgatgtccggatcgaccggattgcctgccatatcggtacgcgaagaacgataaatgctatatggaagcatggagaaacctttggactcgtcgacatatcccgcccacgagagacctctttcgtcgggatgagcgtcataggccaaatccagatagaaattgttcacgttgcagagaatcaccggatatcctttgttggctatctggtaaggtatttcatccgcttcccattcaggaaccgtattccagcaatacactcctgctgcaagttggttcaaatgacgatcggttgtttccggatgtcccaacgctacttcctgccagccgctgaattgcaaattatgttgttgcagatagtctgccatcttcgtaatatagtattcagacagttcgtgggcacttgtcatcccgttttcatccataaacgtccggcagacaggagaacccatccaggctccttcgggtacttcatcgccacctaaatgaatcgtagtcaaaggtacctccgcttcctcatacatggctatcaactcacgaatcactttttccataaaccggtatgtagaaggcaatgctacattcatgacattatccgtataagactgcgcggaaacataacgggaagtgtcttgtgcgtcacttaataaatattcgttggccttttcaggggcagtattcacatacttatgatagcgcgctttcatggacacgattgccgcacgggcatgtcccggagactcaatctccggaatcacacgcacatgtctttgagctgcataacgcaataaatcgataaattcttcacgggtgtaatatccgttgccggaggtagctgcagacggatcatagttgccatcgtagcccggatataaacattccagttcatccgtggtatgtccccggcgtgcgccaaccgaggtcaattcttccaagccgggaatctccagacgccagccttcatcatccgaaaaatggaaatgcagtacgttcagtttataagaagatattacatctaccagctttttcagatgttcaacagtcgtaaagttcctggcaatatcgagcatttgcccgcgatacggcaaatcgggataatcgcggatggagagagcttccaaacggaacagcttttcctgacctttcaacagggagagcaaggtttgcgtcccattgaatatgccatgtgaagtggaagctgaaatatttattagcccgtttcccgtatcaatccgataatattcgccgttcactgctgtttcccgttccggcaaataatccagatgaactgttaccggtgctccggatacaacttccaggccatggatggttgccagcttttctttcagtaattcagcttcgttggcaaaatcgggatggaaagtcagttttactttattttctatagcaaaaccctctttgccggtagccggcaccgcttctttcactgacggaaaaatatcagtttgctgcaactgggctgtagtctccaacgccaaattcgaagcatatatcttatcaggtgcgggataccagtcttctgtctccattcctttcagcggctgtatggtcagtccgacaggcaaggaaataccttgcttactgcctgactgactcacccagtaagtgccttcgggagcatgtgacatttttttcaatccgttggtacaacagaatttgacggtcaacgaatctcccggagccagtggttgaaaattttctgccggatacatccggaagaagttcgcattcaccacttccactttgaccggagcagactcttcctgcagaatctcacgaggcagctgcgaataatagatgatccaatcctttcctaaaggaacatctgagatgttcttcaggacaaatgaattctcatagtaaccgggctgtacttccacagctcccatcttccaagtcaatgacacgggggctttcgccccgtcagtcgatttacaaccggaaatgaccagcaggaggcacagacttccccatattgtatatagcatatttctcataggctttcctgtttttctatatatcattcttttaggtattaatcactcaatcgttcgatgtgcaaagtttctttgcctactccctgcgaggcgtcgaaagtcagacgataatagccgggaacgaaaccgtcgccactcgttattccattggaaccagatagttcaattccatccgtatcgccggacaatgaaccctcttgcagtagcatgcctttatctttattccattgcaaatcgctgtaaatttcaatttcgaaggattcccattcatgagtgttactcaaatacacggtggtctggtatttctgttcaccgattggcacaatatatcctaactgtgatatgtcttccaaattccagcctccactattatatgcttcattccagacgggtgcgcatgtaaatccgtgtcctaccagccagaagcaagtgggagccgtatcacccatccgtgccacccagatataattatacttagaagaataatagatctcccaggttcctgatttgcgcaagaaggtaaacttgccattatccggattatagctaaagaagtcgcgattgtaagcgtgttccacatcttcaaatccactcatttcgaactctttcccctgcgtaaagctaatctgtgcacggaaaaatccctcactggctatcaactcggtttctttaattttcaggttcttttggtagccgactactcccagttcaaaagtcatcacattgaaagtgatttgttcgacaaaccaatcccggtaatcaaaagcaaagctgggtcccgacgcttcaataaggactgccgtattgcttgcttcggcagctccccaaatcagttttgcatcgtccaatgatgctgcggtagagatctttccggatagttccatcggataaccctcttccgaatcggaaacttccgtgaggtacaggtaaggattgtcctcactccggttcatttctaccacctcaccgttatagtgaagataaagcacttcgggaatctgcggacgggttatatggaaatcaaatgtttgagtgacttcactaccttccacattaatggctgtcagaatcaccttcgcttcctgattctcttcaagtccggcttcaaacgggatataaatccctttttcaacaatcgaaacatcagtgcctttcgtacggatcgactgcgaactgaccaaagtttcacctgtcatcaatttcacttccagcgtagacaaaggagtctgcggatcgtgaatcttcacagaaaaataaagagaatcggcagcaggtgtctgatcggtagttgagaattgcagttccgatatttcgggacacgaatatggatacgtcacccggccatcttcttcgctgcatgaagccagccaacaaacagtcagccccagcagccataaaaacagattattgtgtttcatcattttttcttttaaagttttacgttcctcttttcattaatagccttcattttgagtcagattggtgttcttatctttctctccttgaggaatcggccacaactgccgaaaagcctgcaaacctgcaaacagcaatctgccgtctttgtctttatgcttctgcatcacttccagcaaacgattattgcgtaccaggtcgaaccagcgctgaccttccatatacaactctaattggcgttcgttctctaccgccaggcgtcctctggcctgccccatattttcatctaaagaagaaggagcaaaaccggcacgttctctaatactatttacaatccggatggcttccggggtgcggtccaactctaccagtgcttcggctttcaacagcagtatatctgccaaccgcatcaaaatgatattggaagtcttctcgcgaatcttataagacaacgggtaactgtctgccggccaataggtatcataaggcactgatttccaaagaatactggatgcataacgggtatctttctctttgtcaaatttagcaaccagatcatgagtaggtgtacaataacgtcgccaggttactgatccgtcatcttctttcagcaatacccagtaagcccagttgggtgcatcggaggtgtaatagacttcaaagatgctttctgaagaaaatttcttatcgggttgccacaactcgtcaaaattgctgaccagcgtatagccttctgctattactttgtcacaagcctcaaccactttggtatagtcgcgtgttgatttctcccctctcgttgctaacactttggcacgtaaggcataggctgctcccttagttgcctggaaaattcctttattcttgcttaccaggtaacgaatggtattttcttcattcaggtcgtccaggatctggtcatatattttatctgtggcagaacgttccggatacatcaccggataccatttatcgaggttttcggctgtaatggtcggaatcaaatccagcaccatcggggcatcaccccataaacggacaatatcaaaatacgcccatgcccgcaagaacttggcttctgcaataacacgattacgttcttctgctacggtagaagtaggatccatcatcttcgtattttcaatcacactggttgcagtgcccgccatcgaataatactgtgaccagaccagttctactttataattggtagaggtcagtttcaacaaatcaaactcctgttcggccacaccatctccgccgatataacaattatcggactgcacatctccaatagtataattttccgactggaatatatctgctttaaaactctcatacgcaccctgcaactcggcctgtgcatctgccagacttccatatttagactcctgatcttccgttccggtaccttcctgcataaaatccgattgcggtttctcatctaggaaactactgcatgaaacgactaatgtacagagtacgacatacgctaactttattatatttttcattttcgcagctattaaaattcaacattcaaaccaaaaattaccgccctcgattgaggataagtaccatagtccaccccttgagcaacggagtctccgccaaaagcatttacttcaggatcgtatcctttgtatttagtcagtgtgaagagattctgtccggtgacgtaagcctgcaatctggacagatgtatcttattcaaccatttcttaggaaaattataggataaagtgactgttttcaggcgcaggtaagatccatcttctacaaaacgggaggagttatgattattctctgtattaccaacgcgggggacattggtaatcatacccggtcgtttccaacgatccaacacacgaaccgactggtttctaaagtctgtcatgccttccatatcaatacgcgatgcattaaaaatcttattgccctgacttccctgcaagaatacagacaggtcgaaaccggcatacgaaaatgtattcgtcataccgtaaatgaacttgggctgggcatttcccaaagtagtgcgatcttccggatcgataaaaccgttaccattcaagtcacgatagataatatctccggtttccggatcaacgccttctgatatgtaaccaaagaatgtgcctaacggaagaccttctttcaggatgacggctttctccttggattcgtacatttcagcataataataaactttattcaaaccgagcttcgtcagcttattccggttgaaagatatattgaaatcggtattccactgaaagttacctttaaaattctgggaagagagagtgaactccatacctttattcaccatctcaccgtcgtttcttgtcacactgctcggcaccacattctccggcaggctgactgtcaatagtaaatcggtggtctttttgtagtaagcatcaaccgagaaggataagcgggaatcaaacatggtcaggtcgagtcccagattccattggcttgttttttcccaggtcagttctttattggctgccgagccgggtttaatggcaagtcccggatataagtttccctccgaaacgggcagtttactgacgctcatggaagccatgtaagcgtagtttccaaaaccgccttggttaccattcataccccatccggcacgtaatttcaggtcggtaacaatgtcttgtaaaggttgcatgaacttttcgcctgaaattctccaacctgcagaaacagaagggaaagtaccccaacgatgtcccggggcaaaacgagaagaaccgtctgcacggaagttaactgtcagcaaataacggctgtcgtaattgtaggctacacgacccagaaaagaggccagcgtccatgcggaagcagaagaaccgcaagcatccttatccagttgattggcggcactgatggaatgaatatcgggataagactctgccaggtcgaaacctgccatccacgaaccgttatattgtgcacgctgctgggtagcccctcccaaaatagaaaggttatgtttgttgaatgaacaatcataggtcagcaaattttcaaaaagccattcgaagtttcgtgagaaactctcttccacacgcccttttgtaccccgtccgtccgaagttgaaatcgggtccagatagtagtcccaatgttcattggtcagttcaatgccaaaagtggttttaaacttcagtcctttgagtatgtcaaccgtgaagccgagtgagccatttatatggtctgtattcgtgttactgtctgcggcattggcagccagcggattcagaatacgtgcaccgtaagcctgttcatcatattcgttcggatcatacggattccgcttctgcataaacggaggagtattcacaacggataagatggaaccggcacgcaaagaactacggctttcgttcacccattgtccgcctgtatgcgaatatgcaaaattgagtgccatctttagccatttggtctgctcactatccaggtttgcacggaaattataccgattgaaatgtgctttttccacgataccctgttcgtcggaataacctccggaaacaaaatattgcagtttctcggttccatttgccacagacaactgatagttctgattgacacccgtaccgaagaataaatcagtccagtccacatagcgcgtttcactttcggggatattgggggcaacatccgaaactgctttcaagtctttcatcaagtctttatattgttctgtattcaacgcatctatttttttccctaatttagagaaacccacataagcactcattttcacttgtggtgcaccgatctttcctcttttagtcgtaatcaacactactccgtttgccgcacgtgctccgtaaatagctgccgatgaggcatctttcagaatttgcatgctttcaatatcattcggactgatattcgaaatgtcatccgacggcaaaccgtccaccacatacaacggttcattggatgcctgtaccgaagtggctcctctcacccggattgtcactccggaacccggcatacccgacggctgcacaacctgaataccggctgcctttccctgaatagcctgtgcagctgtcataatcggacgttcttcaatatctgccgtggaaacgacagataccgcagtcgtaatatctttccgtttcataaacccgtatcccactacgactacctcttccagtacctgcgaatcttcgctcaatgacacattgtatatgttctgcttattgaccgtatgagattgggaaacataaccgatataggagaaactgatttttgcccccacaggagcttccaaagagaaacgaccgtctatatcggtagcggttccaatattctctccctccactctcactgtgacaccaatcaagggttctcccctccggtcggccacaacaccggtgattgttttcttatcgcctttctggggggcgttctgttcacttttcagagtaagcaccacttgcttacccgattctattttataactaatagatgatcctttgaaaactttttctaaaaccgcatcaatactttcattactcactgtcaatgaaattttttgatctaatccgggaagcttatccgtataaaaaaagctgtaatcagccttcttttcaatcactcgtatcgtctggcgtatcgtctgattcttcacagagaaagtgatctgcgcacttgcctcttgagacacaaacaacaagatacaactgaacataacaagcctgaatatgatatgtaattgttttctcattagtaattagctttaaattctttaaaatataagtctgaaaattagactttttattatctttgtaaaatcgtgaagcaaaaaggattccctttcccttatccgcataaggaaaatttcttttttactatcatgtataaaccgtatttgatttcggggtagaattatgctgctacataattctaccctctttattttattatgaggtgtcttccataaatcgtcctttttagttaatactacttcctattctcaccgtatctccttctaactcataggttaaaggataagtaaggcttataatgtaaaatacattatgcaagctgctgttccggatggttccggaaaatggcacgttcttcagtttctcggagtcaaacacgactttcactccgtacatccgctccagcgtagtcgcgatctccgctaaagaggatgaattaaaaatcaacatattgttccgccaaaagtcgatttcacgcatatccgagatgggcgatttagtaaatgtctgcttgttcttatggtattctaccttctccccgggtttcaacaaggttacgtccgttttattagaaaccttgacgcttccttctgccagcagtgttgtgacagaatgatcgtcacaatagcctttcacatcaaaggtggttcccaacgcttctatctccagatcattgcagcagacgataaaacgtttatctttgtttttcgccacttcgaaataggcttctccgtccaaatagattttccggtcggatttgttgtactccgcatcataagaaagatgagtagccgaatttaaccagactttcgttccatcgggcaaagtcagattcgctttctgtccataatcgacagccaccatgaaagggtcctgtgacaccttattcatgtgttctaccccaaagtaagtggccagtcccaaacaaaccggtaataagatagtggctgccaccttatatataataggttgccagcgccgtttcttcggagatagtatcttgggctcatccagattcctctgcagatggttccacatttcttcttccactgtcttatcgatttcgacggctgcttctttccacatttgctcgcaaagcagattaaactcattacgaattccgggtttacgaatccattcaataagtatccttctttcttcagaagaggcctcctttttgaagaatttttccaatagtactatgtaatcgtgttgctccataattttcctgttctatttatactagtcttgagagacagaaaaggactacagagaaatcgaaatagttcagatattaacttttattaaaacttctatattagatatcatgtaagaagagagagactgaaaaggcaattattcccagtttgtcacgcaagaaatccaaagaacggtgtacctgtgtggcaacagtcttttccgagatattcaactggtcggctatctcacgatagttcaaccctgatttccaataaagcataaaaacttcccggcgcgctggaggcagttcttctaaaagtttcaggatatattcttccaaaaacaaataatccagttcttcatctatctctacggattcgtcagatgactcattcgcaagcctgtctacataattttgaagcaggagttcgcgtcttacataatgatataccatgttttgggatattttaaaaagatagccgtcaaaattcccttccagatcgatattaagccgcttctcccagatatggagaaaaatatcttgtgtgatatctttcgccaccccggcattgctcaccatagaaaggacaaaattataaatgcgagcattgtatccacgatacaatgcctcaaaagcatttttatttccttctttcaataattgaagttgctgggtggtaatcattataaaataaggttaaatcatatatcgattcaaaaatagcgaaataactaaagccgacaaccaaagcacttgttaaaatttcaataaatcaatatcatagcatttaaaagggaatagaatacaaaaacacatccttgacatatcatatcataaattcagccattttgctataaaattaatagaaattattaatcaacagctacaatttcgaacttttattcctacatttgcggtcaaatgataacttattaacaaatttcataaataccatggctaaaataacgaaagaagccgctttgctctatcattcacagggcaaacccggtaagattgaggtagtgcctaccaaaccttacagtacacaaaccgacttatcactcgcatattctcccggtgtagcagaaccttgtctcgaaattgagaagaatccgcaagatgcgtataaatatacggctaaaggtaatctggtagccgttatttccaacggtacagccgtactcggactgggtgatataggtgcattgagcggtaaacctgtaatggaaggtaaaggtctgcttttcaaaatttacgcgggcatcgacgttttcgacatcgaagtggatgaaaaagatccagagaaatttattgctgcagtaaaggctattgctcctactttcggaggtatcaacctggaagacatcaaagctcccgaatgttttgaaatcgaacgtcgcctgaaagaagaactggatatacctgtcatgcacgacgatcagcacggtactgctattatctccagtgccggtttggtgaatgccctgcaagtggccggaaagaaaatcgaagatgtaaaaatcgttgtgaacggtgcaggtgcatctgccgtatcttgtactaaattgtatgtgtcactgggtgcacgtctcgaaaacatcgtcatgctggatagtaaaggcgttatcagcaaggcgcgcacggatctgaacgaacagaaaagattttttgcaaccgaccgcacggatattcacacgctggaagaagcaatcaaaggtgcagatgtattcctcggcctgtcgaaaggaaatgtgttaagccaggatatggtgcgcagcatggctccgatgccgattgtgttcgcattggctaacccgacaccagaaatctcttacgaagatgccatggcagcacgtcctgacgtactgatggctaccggacgttctgactatccgaaccagattaataatgtaatcggtttcccgtatatcttccgcggtgctttggatactcacgctaaagctatcaacgaagagatgaagattgcagccgtacacgctatcgctaatctggcaaaacagccggtacccgatgtagttaatgcggcataccacgtgaacaacctctctttcggcgcggaatactttatcccgaaaccggtagatccacgcctcatcaccgaagtttcctgcgcagtggcaaaagctgctatggaaagcggagtggctcgcactgaaatcaaagactgggatgcttactgtgttcacctgcgcgaattgatgggttatgagtccaaactgacccgccaactgtatgatacagcccgccgttcaccgcaacgtgtcgtatttgccgaaggtatccatccgaatatgctgaaagctgccgttgaagcgaaagccgaaggtatctgtcatcctatcttattaggaaatgacgaggctatcggaaaactggcagaagaaatggatcttagcctggaaggtattgaaatcgtcaatctccgtcacccggacgaatcggaacgccgcgaacgttactcacgcattcttgcagaaaaacgtgcacgcgaaggctttacttatgaagaagccaacgataaaatgttcgaacgcaactacttcggtatgatgatggtggaaacaggagatgcggatgctttcatcaccggactttatacaagatatagcaatacgatcaaagtggccaaagaagtaatcggtatccaaccgggcttcaaacacttcggaacaatgcatatcctgaactccaagaaaggtacttacttcctggcagacacactgattaaccgccacccggatacggaaacattgattgacatcgctaaattgtctgataaaacagttcgcttcttcaatcacacgccggttatctcaatgttgtcatactccaacttcggtgctgatactgcaggtagccctgtgaaagtgcacgaagctgttgcccacatgcaggaagaatatccggaactggctattgacggtgaaatgcaggtaaactttgccatgaaccgcgaattgcgtgataccaaatatccgtttacccgcctgaaaggaaaagatgtaaatacattgattttcccgaacttgagttcagcaaacgccggttacaaactgttgcaggcaatggacccggatacggaattcatcggccctatccagatgggattgaacaaacctattcatttcaccgatttcgaaagctctgtccgcgacattgtcaatatcacagctgtagccgtgatcgacgccatcgttgacaaaaagaaaagaggaggtaaatgaaacgtccgttatccaaatcacaaatagtttgcatcagcctgctttggttggcgctttgctatctagttctgacaaaagccgaacgaattgacgggatgacggcggtaatgcttggcatttcggcagcattagtgtttattcctgtctataagtcgatcaaaaagaacaaataaatatcttttttcctatttttaatgcgataaaatatcaaatttgatgttttatcgcatttttctttataaaatgtttgctagttcaatttttatctttacttttgcaaccgaaaataaatatccgatgtacccatacgcagatgtgcaaatctgctatatagcacaaaagcacatagtcaaacggtatattagcaaattgtcaaattagcactttatttatatcaaccaattaaagaaaaaaaagattatgaatgcagcaaaggtattagacgatctgaaaagaagatttcccaatgaaccggagtatcatcaagcagtagaagaagtactttctactattgaagaagaatacaacaaacatccggagtttgataaagtaaacttgatcgaacgtttgtgtattcctgatagagtatatcagttccgcgtgacttggatggatgataaaggtaatattcagaccaatatgggttaccgtgttcagcacaacaacgcgatcggtccttacaaaggcggtatccgtttccacgcatctgtaaacctttctatcttgaagttccttgcctttgaacaaacattcaaaaactcactgactactctgccaatgggtggtggtaaaggtggttctgacttctctcctcgtggaaagtcaaatgctgaagtaatgcgcttcgtacaggcattcatgctggaactgtggcgtcacatcggtcctgaaactgacgttcctgcaggtgacatcggtgttggtggccgcgaagtaggtttcatgttcggtatgtataaaaaactggctcacgaatttaccggaacattcacaggtaaaggccgcgaattcggtggttcactgattcgtccggaagctacaggttacggtaacatctacttcctgatggaaatgttgaagagaaaaggaactgacttgaaaggtaaagtttgtctggtttctggttctggtaacgttgctcaatatacaatcgaaaaagtaatcgaactgggtggtaaagtagttacttgctctgactctgacggttatatctacgatccggacggtatcgaccgcgaaaaactggattatatcatggaactgaagaatctgtaccgtggccgtatccgtgaatacgcagaaaaatatggttgcaaatatgtagaaggagctaaaccttggggtgaaaaatgtgatatcgctcttccttctgctactcaaaatgaattgaacggtgaccacgctcgtcagttggtagcaaacggttgtatcgctgtatctgaaggagctaacatgccttctactccagaagctatcaaagtattccaggatgcaaaaatcctttacgctccgggtaaagctgctaacgctggtggtgtatcagtatcaggtcttgaaatgactcaaaactctatcaaattaagctggagcgctgaagaagtagacgaaaagctgaaaagcatcatgaagaatatccacgaagcttgcgttcagtatggtacagaagctgacggatacgtaaactatgtgaagggtgctaacgtagccggattcatgaaggttgctaaagcaatgatggcacaaggtatcgtataatcagcaaaagatatataagctatagtttatttaaaagctcccgtcttccgtgaaggaagtgcgggagtttttttatgcaataaaaagatgtacgacacccgggtgtcagcacaataatctttgtagaaaaataaatagcagacaatacacacacaattcatagttattctctatctttagatagaaattatctgtttgacaagcgagcaaaagaagcctatctttgttatatattataaaccccggatgaaagaataaaaggaaacagtctgcttatacttgtatccgactaaaaaatctatttatggaaaagaaaaaacttactgcagcgaacggtcgtcctatcgctgacaatcaaaactcgcaaaccgcaggtcaacgcggacctgtaatgttacaagatccctggcttatagagaagcttgcccattttgatcgtgaagtaattcctgaaagacgtatgcacgctaaaggttcgggagcttacggtacgtttactgtcacccatgacattacaaagtacacccgtgctgctattttcagtaaagtcggaaaacaaacagaatgttttgtccgtttctccaccgtagccggagaacgtggagctgctgatgcagaacgtgacatccgtggttttgctatgaaattctatacggaagaaggtaactgggatttggtgggtaacaacactcctgtattcttcttacgtgatccgcttaaatttccggatctgaatcatgccatcaaacgagatccgaaaaccaatatgcgtagcccgaacagtaactgggacttctggacgcttttaccggaagcattacatcaagttactatcactatgagtccgcgtggtattccttattcatatcgccacatgcacggattcggcagtcatacttatagttttatcaatgcagaaaatcaacgtatttgggttaaattccatctgcgtaccttgcagggtatcaagaatctgacagaccaggaagcagaagcaatagttgctaaagatcgcgaatctcatcaacgtgatctcttcgagagcatcgaaaagggcgattatccgaaatggttattccagattcagttaatgacggaggaagaagcggacaactatcgtatcaacccgtttgacctgactaaagtatggccgcacaaagatttccctctacaagatgttggtgtccttgaactgaaccgcaacccggaaaattattttgctgaagtggaacaagctgctttcaacccgatgaatattgtagacggtatcggtctgtctcccgacaaaatgttacaaggtcgtttattctcttatggcgacgcacaacgttatcgtctaggggtgaatgctgaacaaatcccggtcaacaagcctcgttgtcctttccacgcctatcatcgtgacggtgctatgcgcgtagacggtaactacggtgctaccaaagggtatgaaccgaacagttacggcgaatggcaggattctcctgacatgaaagaaccgcctcttaaagttaccggtgaagtttacaactacaatgaacgggaatatgacgacgattattatagccaaccgggcgacttattccgattgatgccggctgaagaacaacaattattgttcgaaaatacagcccgtgccatgggagactccgaattgtttatcaaacaacgtcatgtgcgcaactgctacaaagccgatcctgcatatggaacaggagttgccaaagcgctgggtattgacttacaagaggctttgaaagaataatctgctatcactttcctctacaggtactccttcttcccaaagaaagagtacctgttttcttataccccataaggtataattcataaatctacaactaaatttataccctaaagggtgtaaaatagaaaatttacattatctttgtacccaaaagggtataatatgaacgataaatcattatcagaatacgtcaagcaaatgcgtaaagaacataacttgacccaagtagagctgtccgaaaaatcaggagtcgggttacgttttgtacgcgaactcgaacaggggaaacagactttgcgtcttgataaagtaaatcaagtgcttagtctctttggaacggaagtgggtgttgtaccaataagtaaattcaacaagctatgagacaagcactcatatacaaccaagaccagttggcaggattgcttacagaagatgaaaatggctatacctttcaatatgatacagcctacattaaatccagcgatgcggaatctatcagcctcacactgccaatctcggaaaagccatatacaagtctaatattattcccattctttgacggtcttattcctgaaggctggcttttagatattgctgaaaaaagttggaagataaatcgacgtgaccgtatgtcactactgcttgcctgttgcaaagattgcatcggtgcagttagtgtgattcccatcttaaataaagaataatgatgagcagatgcctatattgttatcaggaacttggcgagggagaaactgattttcaccctcaatgcggaaagaaaatatttgggagcaaaacagttcctctcctaccttatacaaaagcggatattaagcaacttgccgaacaagtcatacgctcacaaaccacacttacaggagtgcaagcaaaattgtctctcgatatatcatcgtcccccaaccaaccgcaacgctttactatcgttggtttatggggacgttatattctcaaaccgcaaacggaacaatttaaatacatgcctgaagttgaggatttaacgatgcatcttgccgaattggctaaagtgaacgttgtccctcattcattgattcgttttgccgatggcgaattggcctatatcactaaacgcatagatagaaccgcaaagggtgaaaagttgccaatggaggatatgtgccagctctcggaacgcctcacagagtataaatataagggttcttatgaaaagatagcaaagataattatgcaatattcctctgtgccaaaacttgacgtaataaatttctgggaacaagtcgttttctcatggctgaccggaaatgcggatatgcatctgaaaaacttttcactttatagtcagcgtaaaggctattattcactgaccccgggatatgacatgatctctacggcactcctcatgccggaggacactgaagaattggctttgacactttatggaaaaagacgcaaaatcaagcgttctgattttgaagttgccatgaatagttgcagtttagagaaaaagatcatagacaacctattttctaaatttaccaaagttgccgaaaaatggttagagttcatagatatttctttcttgcctaaagaaatgaagcaacagtacaagctgattataacaagaaagtatcaatccttctttgatgcgcaaatataaaaacaggctaatacaacgaaatgacatgaaacttagagaggataaaattctaaacataaggatctattaattagatatttaatagttcctttcctctcgctttaagaaagagggcttccgaaaagaagcggacagcctcttttatatatcattaccgacaactctgatttttcttttaacattctacagaaatagccactcaactattttaactatctttgtcccctgtataaccccttaatatttataacagactgatgaaactaaaaaatttattcgccggaatgatattatgtctggcagttgcttcctgcattcaggatgaagctctaaacgttgaagcagctatagacggatgcagcggaaacgatattcaacaatgtttgattgatccaaacgagttcactgttcagctatatgtatcaagagctgccgatccgtctaagataaacatcaattttgaccttcctgccggagcttccatagcgcctgtcaaacagctagccgaagacggagttaatacttataatttcaaagatgaaaataaccctagagaatttaaggttacatcagaagatagcgacttttctgctacctatacaatcagactttggcaaacagaaatgcctatcacatacaacttcgaaacgctaagttcagacaatccttaccataagtttactgaagagaatccctccgcaggagctatcattcgtagattggaattagctagcggaaatcctggattcgaactgactaaaatggcaaaaacaccagaagactatccgacagtacaagtaaatggaggagttgatggcggtaaatgtgtaaaattagagactaagaataccggcagttttggaagcatggtaaatatgcatattgcagctggtaatcttttcattggttcatttgaagtagggcaagcattaagcgatgcaatgaaagccacccatttcggatttccattcttctactatccacttgaactgaaaggatcgtataaatacaaggcaggtcctattttctcatcaaaaggagtaccagtggaagggaaaaaggataaatgtgatatttatggagtattatacgaaacagatgccaatgtacaatttctcgacggttcaacctcactcaattcaccaaatattgtagctttggcacggaatcttgaaaagcttcctgaaacagacagttggacagagtttagcttcaaattcgagccaaaaaacggcaaatctattgattccgacaaattagaaaaaggtatctacaaacttgccatcgtattctcatccagtgtagacggcgcgaagtttgagggagctgtaggtagcaccctttatgtagacaaagttaaaattgttcaaacttctgacccgaatgaatatcccgcaaattaataataaacccaatcaattgataaaataatgaagaaaacaatatattataaagtagtagggattgtattcctcacaatacttttttcacatgtggcatatgcccaaaacgaacgtaacaaagctcttatctactcatacttacatggatgggagtatagtatcaaagcaggattaagcattggaggtacttctcctctacccttacctaaagaaatacgtaatattgatagctactctcccaacatagctatcgctattgaaggaaatgctacaaagtggttcggtaatgacaagaaatggggaatgactgcgggtatacgtctcgaaaacaaaactatgacaaccgaagctaccgtaaaaaattacggaatgaagatcatcaacactaatggcggcgagctacaaggtctttggactggtggtgtaaagacaaaagtgaaaaattcatatctcaccattcctgtattggctaattataagataagtgaccgttggaaagtatcacttggtccttatgtttcttatatgactgaaggcaacttctccggccatgtatatgaaggacatttacgtacgcctgatgaaaccggtcaacgggtagatttcagcggtgaaagtgttgcaacttacgacttctctgataatttacgcaagtttcaatggggagcccaattaggcggtgagtggaaagctttcaaacaccttaatgtttatgcagatctgacatgggggctaaacgacatctttaagaaagactttgataccatcacgtttgcgatgtatcctatctatttgaatattgggtttggatatgcgttctaaagcttattacataataattttatctaaaactttcataattgtctaattccaacaacttaaattatggaaataaaaagagagcttttataatgaagctctctttttatttccataacaaggattttacttacctatcacctccaaatcatctataaaaagtgtactaccaccagcaccgacaaagagatcaccttttttacttgaagaacatacaatagctatctgataatctttacctgcctcatactttttaccttccaaattttgaaatggaatcttaaacgattcccaatcagcttttgcactaccatctgccaattgagctactgcaacacggcgatctgaggtatttatatcatgccctgtaagaggaatattatttcctttctcatccaaagtcgtctcatacaatacagccattatagaacactcatctatagcgccttctactacttttacctcttcaggtttagttgctccttcgccattaataaatttttctcccggaatatatttgtaccatcctttcaaatataatggttctttatcataaggaactccaaattttgttgcagcaagtctatcaacaccttctgtcaaatttaactcaaatgtccctgtatataaagaaccggctgttaatgcggggatcaaagatgatgtttttgaactagtatccaaagtcactaacttggcagcataagatcccgatttcgcatctgtactcttagaaactggcatttctgtcaaagaaacttgcataatctttaacatagcaactccctccgtacttgtagctaatacctctgtaggtttaggtttatcataagcataacttaaaaaactacctgccacaggttcccaaccctcgaatccaaaagccaatacagaagtagttactctcgcaggagtctttaccacatactctaccgaagttccattctctgctacaatcataataaccacatccgaagaaaaatcgatagcaactccactttgtaaaacacaagttgctttttcagaataagcaaacgtaggcactaacccttttaacaaatcaggattagcatccaccatagcttgatcaacatcaaaagttattgtattatcctcattaatcacaggatgtcctataacacaggcattagcctcattctctaaatcaaaagtaaaagaaagaattttcgcttcgccactttcattaccgctcatcttatctccctcaaaagcaacatccactgtttggcctaaagctgcaactgttacacctattttcatactaactttcccgtctctcacagttccacttaccgacgtaggaagcgttcctaacatttgaccaaactctgtagtaaacttcagatctttctgtccactaaaagattgtactccatctttttcttccaccgtacaaggcacttcaatatcacctaccaaccgacctgcaaatgaaaattttttcaaagacaatatgacttgtgatgtttgatcacctgatttagcaatagatatcacttgagagacaggatcagctgcacttccatcaatggatactaccaaattacctttatagctaccactaatatcagtaacttctgtctgatcatcaccattctttccattatcatcatcgtcactacaagacgtaaacaatgtcgcagtacacaatactgcaaacagataataaaataatttctttttcatttctaaattctctttttaattaataaaagcaaatacgcgatataccatcgcatagatccaaaatttcacagctgcaaagtaactactatttccacatctccgcaaggtctatttttcttgtttctgttctatttttaaagaaatatactcaaaaccccttgtaatataccatttttcaagtcaaaattataatttaagaaaagaaaagagagcctatttccctaaatctacatatctttgttataaagtaagaagtacgaaacatggaagaattacccaaaatagacttacctgaagaatggcttataggtacaggagttaacaaagaattgctcaatttatatacaaactttccctgccggttgaaatcggaaatattcgtattatgtatggatggagaaattgaggcttcagtcaatctaaaccgtatcacagtacgagctaacgattttgttactatcatgccgggaagcattcttcagatacacagtgtaagcggagaaccaatactttattttggaggattctcatcaaaatacatagaacaagccaatttgacaccttcatctatcaagactttatttataacgataggacgacctgtcatttcattaaaaccggaaggagccaagttattggcggagtactttcaattcttgataaaattatatgcctttttcaatgaatcaacccgtaaaggtattactccgcacttgtacaacaacatacacgcagggatagctgccatgtataacacccaactacaaaacaccaaagaatttttatctaaaggtgaattaatctacaaaaacttcactcaactggtgatgcagaattacaatcatacccgaaatgtagcatggtacgccaaaaaactcaaaatctcaaatattcacctatgtacaacagttaagaaagtcactgggaatacatgtgcagaaatcattgcacacatggtcatcatggatgccaaatcacaattaaagtccacccatctttccattcaagaaatttctaattcactcaattttgccaacacatcgttttttggcaaatactttaaacgatatgtcggcatgagcccattaacctatagaaataacggataaatagaataaaccatacaccaccttaagcctccggcatcaagactactcccagcttcttcttaccgtccatcttgactaccacaggcttttcaaagcgaacgtgacggagatagttcgtttcctgcactgccggttgcgcattgaggaaatcctgattatacactccatcattcataaaggcgttgatcgtgaaataccctaccccgaaagaagtcaggttctggaaaaagtgtgtcccctgactgggatctacccggtaattagtcagaccggcttccacaatcacacgggcagccgagatatgcggccacttcaccggaataccaagccatgtatcactgcttccccaacgtcccggaccgacaagcacataattctttccttcattcaagaattgttggttaatcttttctatctcccaggcaattgtctgattgttggaggcactataattatcggtctttacatagaccacatcataaatatcattcatgataccatgtcccaatgaattatatgagcggagaatcacatcttcatccggtatctcgttcaaatcctcgtccagcatttctttactgtctacgataggacggatctgcaacagatagaaagttccggatttatcatgttcgcaacttaacgttgctgcaaattcaatttcaaccggacggcgcatctcctgttcaccatatttcaatactaactgcagaatacgagctaacggaaaaacatcatgttgcaggatattagcaaaagtaatcaccttacgtcctcccggatataaaccatcacgaatgatctgatcgtacggatcgtaggtagaagcaatataacgcagagcaccgtcactttctgcctctttgacatgaagtttcagcaaattaaaaccatcgtcgatagaaaaatcatgtccggcatttttcaaatccaatgcatagaaacgggtttgagtctccttgagagcaatttccatttcgctggtctgtaacacctgattaggatgataaggagaaaaacgaagggtcatgccaccgtcaacaatatattttcctaatcccaaagccagattcaccgttccctcttctgccttttcattccccaacggataataattgagcgagcgtgccacaccggacatggaaggataataacggtcaccatactgattgccaactacttcctgtaagataacagccattttctcctgatcgattacattcgacgtagcttgcatatacgctttgctgtcacggaaataaaccgaagcatacacccctttgatggcatcggaaagcatccgcaacatttcatagcggtcgtccagataaggaatcatgtaagtgttgtaaattccggcaaacggttgatagtgagaatcctccaacaaggaagaagaccgaatggcaatcggagacttcacgacatcgaagaaagtgaaaaagtcctctatcaaccggtccggtaatttagccttcaggaagtatttcaaaatcgtagcatcatccgcatccgacagtgcaatctgatacaagttgttggtgtccatgaactcatcaaagacatccgtacaaagcaccactgttttaggaatagcaatacgcgcattttcaaactcgtcaaactccggatgacgcttcaccatattatcaataaatgccagtccacgcccttttcctccgagagagccatccccgatacgggcaaagttagaataacggtcgaagcgatcgcgcttaaagaccgccacaactccctggttcttcatcttacgatatttcacaatcgcctcaaagatgattttacggtgagcatccacatcctgaagactattccaggttatcggtttcaaaaattcagccaccgggaacatggcacgtgaataaaaccaacgcgacacgtgattcctgctgatatgatataagaaagattccgcaggtacggcaaaaagaatgttttgcagctccttcaaattccggacgcgggcaatctcctccccggtatccggattgcggaaaataaaatcaccaaaaccaaaattatcggagacgatacggcgcaaatcaacgtccatcttcttggagttcttatcgataaagctagcaccatacttgactgcataagacgaattttcagattcggaagactgaataatcaaaggaacaaacggatcattcttacgtatctccgcacacagcttgatacctgccagaccgtctttctctccccgttccactttcgggaaacggacgtcagtgattacccccaatatattattctgatacttatgatagatctccatcgcctcctgatacgtacgtgccaacactattttaggacgtccgcgcatacggagcgtacgctggtgtgcattcaaggcttcggtagagaattcctgactctgcttcaacacgaacttatacagattcggcaaaatggaagaatagaaacgaatgccatcttccaccaaaagaatcagctgcacaccgacctcctgtacatcgtgttccagattcatcttgtcctctatcaacttaatgatagacaccaacaggtcggtattacccaaccagcagaacacatattcgaacgcacttaaatcttcattgataatccgtttggtaataccatggctaaaaggagtcagtatgacgataggaatatgctcgtatttctctttaatgtgacggccgatatcgaaactgtcattatcccccgtgctcggcatacaaatcaccaggtcgaacgacatattttccaactgtgacaatgcttcctcctccgtagatacctgcgagaaacgaggtggatagcgcagagacaaagaagtgtattcattgaaaatcttctcatcaatgcgcccgtcatcctccaacatgaaagcatcgtaaggattagcgattaataacacgttaaaaatccgccttgtcatcaagttagcgaattgtgtatctttgaagtaaagctggtttaatttatatttactaagcataaagtcattctcctttcttatttcaaatcgtctatctgcagaatcacattttgcaaagttaattctttaaatctcattttccaccatcttctttataaagtttacttgtttatctcttattattttgtagatttgtaactttaagtttattcaaaaagactttttattcacatgaaaaaagtaactttattaatgagtggaatcatggtgatgtcatgcgctccccaacagaaaaagctagtctaccccgagacggcaaaggtagacaccgtagacgtgtacttcggtacacaagttcccgacccttacagatggctggaaaatgacaccagtgcagctactactgcctgggtagaagcacaaaacaaagtaacgaatgagtatctaagtcagattccattccgggaaaacttgttgaaacgattgaccacactggccgattacgagaagatcagtgcgccaatcaagaaacatggcaaatattacttcagtaaaaatgacggcctgcaaaaccagagtgtattctacgtacaggattcactggacggcgagcctcgcattttcctcgacccgaacaagctctcggacgatggcacagtggcactgaccggtctttacttctcaaacgacggcaaatataccgcttacagtatctcacgcagcggatcggattggtctgaaatatttgtcatggacactgaaagtggcaagttattggaagaccacatcgaatgggccaaatttaccggtgccgcctggcagggagacggcttctactacagcgcctacgatgctcccgccaaaggaaaagaattctccaacgtaaacgaaaagcacaaaatctattatcacaaaataggtgaaccgcaatcgaaagataaactgatttatcaaaatccggcttatccgaaacgtttctatacagccagcaccagcgaagacgaacgtattctcttcctcacagaatccggtgccggaagaggcaataacttgtttataggagacctgaaaaaaccgaattctccttttatccagctgactaccgacctcgactaccaatactacccgattgaagtgatcggcgaccagatttatatttataccaactatggcgcaccgaaaaaccggatcatggtagccaacatcaaccgtccgaaactggaggactggaaagaactcgttcccgaatcggaagccgttctttcaaacgcagaagtgatcggtggcaaactgttccttacttacgacaaagatgcttcgaaccatgcatacgtttacggcctcgacggcaaacaaattcaggagattcaactgccgtcactcggttccgtaggctttagcggcaacaaagacgataaagaatgtttcttcggattcacttcattcaccattccgggtgccacttacaaatatgatatggaccagaacacctacgaactataccgtgcaccgaaagtacagttcaactcggatgattttgtgacggaacaagtattctttgccagcaaagacggtgtaaaagtcccgatgttccttacctataagaaagatctgaagaaagacggcaaaaatcctgtattcctctacggatacggtggtttcggcatcagcctcaacccgggtttcagtgcaatgcgcatcccattcctcgaaaatggcggtatctacgcacaagtcaacctgcgtggtggcagcgaatacggtgaagactggcacgtagccggaactaagatgcagaagcagaatgtattcgacgacttcatctctgctgccgaatatcttatcaacgaaaaatatacgaataaagacaaaatcgccattgtaggtggctccaacggtggtctgctagtaggtgcctgcatgacacagcgtccggacctgttccgtgtagcaattccgcaggtaggcgtgatggatatgcttcgctatcataaatttactatcggttggaactgggcaagcgattacggaacaagcgaagacagcaaagaaatgtttgaatacctcaaaggctattctccattgcacaacctgaaaccgggcacaaaatatccggcaacactggtaaccactgccgaccatgacgaccgtgtggttcccgcccattcattcaagtttgccgctacgctgcaagcagacaacgacggtacaaacccgacactgatccgcatcgacagcaaagcaggtcacggtgcaggcaaaccgatggcaaaagtacttgaagaacaagcagacatctacggtttcatcatgtacaatctggacatgaagccggattttaagaagtaaaaagtacaaagtattaaattctggtatcaagtattaagtattagcactgaatacttgatacctaatgctttttttactatcattttatcattatttaatcaaaataatggcataaaatcaatcgcatctgaaaaattttcctatatttgcagtgagttagttgacattttatcagaattaaccttttaaaatatagtatcatgaacatccagaaaatcatgtcctctttggaggctaagcatcccggtgaatctgaatatcttcaggcagtgaaggaagttcttctttctatcgaagatatatacaatcaacatcctgaatttgaaaaagctaaaatcatagaaagattggtagaacctgaccgcatcttcactttccgtgtgacatgggtggacgatagaggcgaggtacagaccaatctcggctatcgtgtacaattcaataatgcgataggcccatataaaggtggtatccgtttccatgcatccgttaatctttccattttgaagttcctcggtttcgaacaaacattcaagaatgcactgactaccctgcctatgggtggcggtaaaggcggttccgatttctctccacgcggtaagagtgatgctgaaatcatgcgtttctgccaggcatttatgctggagttgtggcgtcatctcggaccggacatggatgtgcctgccggtgacattggtgtaggaggacgtgaagtgggctatatgttcggtatgtacaaaaaactgactcgtgaatttaccggtacattcaccggcaaaggattggaattcggcggttcattgattcgtccggaagctactggtttcggaggactgtattttgtcaaccagatgcttcaggcaaaagggatcgatataaaaggtaagacagtggcaatctccggtttcggcaacgttgcctggggagcagctactaaagctaccgaactgggtgcaaaagtgattacgatttccggtccggacggatatatctacgatccggatggtatcagtggtgaaaaaattgactatatgctcgaacttcgttcttcgggtaacgatattgtggctccttatgtcgaacagtatccaaacgcaaccttcgtagaaggaaaacgcccgtgggaagtgaaagcagacatcgcacttccttgcgccacccagaacgaattaaatggagaagatgctcaaaatctcataaaaaatgacgtactttgcgtcggagaaatttccaacatgggatgtacccctgaagctatcgatcttttcattgaacataagacgatgtatgctcccggtaaagcggtcaacgcaggtggtgtagccacttccggtctggaaatgtctcaaaacgcaatgcaccttagctggagtgccgccgaagtggacgaaaaactccatgcaatcatgcacggcatccatgcacaatgcgtgaaatacggcacggaacccgacggatacattaattatgtgaagggtgccaacattgccggatttatgaaagtagctcacgcaatgatgggacaaggcgttatttaaggactttgtttagttgtatttgtatttgtggtttgcgctgctcgtctcctgtgacaggacgcgggtagcgctatttttttgagattaacattattttcgctggaattaattatctttgtagcatgataggttaaataatagtttgtgaatttgttatatgcgataaacaactcacaactaataatttaccattattggttttgtaattaataatcaagtaataaataaaaaatgctacaacccgaattgaaatttcgccgtgacaaaattcgcagtctgatggtgtcgcagggcattgacgccgcacttatcacgtgtaatgcaaatttaatttacacgtatggctgtgtagtcagtggctatctttacctcccccttcattcgcctgcactattattttttaaacgtcctaataacatcacaggagagcactcattctctatccgcaaaccggaacaaattgttgatctgctgaaagaacaaggattaccgatgccaaccaaactgatgttagaaggtgacgaacttccttatacggaatattgtcgtctggccggtctcttcccggaagcggaagtggtaaatggtaccccgttgattcgccaggcacgcagcgtgaaaacacctgtagaaattgaaatgttccgccgctccggcattgctcatgcaaaggcttatgagcagattcctggtgtttatcgtcccggtatgacggacattgaattttccatcgaaatagaacgcctgatgcgtctgcaaggttgcctcggaattttccgggtattcggacgcagtatggaaatattcatgggtagcgtactgaccggagataatgccggttacccctctccttatgattttgccttaggcggtcagggacttgatcctgccttgccgggaggagcaaataaaactccgttaaaagagggacaaagcgttatggtggacttaggtggcaacttcaacggttacatgaacgatatgagccgtgtattctccatcggcaaactgcccgaagaagcttacaccgcccatcaggtttgtctggatatccaagaaaaaattgcttccattgccagaccgggtattgcctgtgaagtgctttacgacacagcagtcgaagtggtcaaagcagccggatttgccgacaaatttatgggaacaggacaacaagccaaatttatcggtcacggcatcgggcttgaaattaacgaagctccggtactggctccccgcataaagcaacaattagaactgggtatggtctttgccctcgaaccgaaaatcgttattccgggtgtaggtcccgtaggtatcgagaactcttgggtagtgaccaacgaaggaatagaaaaactgacgaactgcaatgaagaaatcattgaattaagttaaacagacgatgaaaaagatgtgtccggcaaagaacaggcacatctttttctactaataataacacacttaacccccaaaaccaatgaaacaacctttcattctaacccttgtatcctctgttgcctgtgctgcaacagccgccaataaagcaccggaaaacaccacaccgacaaagtcaaaaacacccaacgttgtatttatctacgccgacgatctcggctacggcgatctggaatgttacggagctaaaaacgtacagacacccaacgtcaaccgactggcaaaatcgggaatccttttcaccaatgctcatgcaacagccgccaccagcaccccttcccgctactccatgctaaccggagaatacgcatggcgcaaagaaggaacggatgtagcggcaggaaatgccggaatgattatccgtcccgaacaatacaccatggcagatatgttcaaaagtgtcggttacaccactgccgcagtaggcaaatggcatctgggactcggagatcaaaccgccactcaagactggaatgctccgttaccgtgcgcactgggcgatttaggtttcgactatcattacattatggcagccacagccgaccgtgtaccctgtgtatacatcgaaaacgggaaagtagccaactatgatccgagtgctcccatcgaagtcagttatcaaaagaacttcgagggtgaacctaccggaaaaagtaatcctgaattactttataacctcaagccaagtcacggtcacgacatgtcgatcgttaatggaatttcacgcatcggttttatgaaaggcggtggaaaggcgctctggaaagacgaaaacattgctgattcacttaccacacacgccattcaattcatcgaggaaaaccaaaacaaacctttctttctctactttgccaccaatgacgtacatgtgccccgctttcctcacgaccgtttcagaggaaaaaatccgatgggattaagaggcgatgctatcgtacagttcgattattgtgtcggtgaaatcctgaatacactcgaaaaactgggattaagagaaaatacactcattattctttcaagtgacaacggcccggtagtagacgacggatacgatgacaaagcagaagaactactcaacggtcatagtcctgcgggaccactacggggcaacaaatatagtgcctttgaaggaggaacccgtattcctgccatcgtcagctggcctgcaggagtaaaaaaaggaatgacttcagacttattggtttcacaagtggactggctcgcctctctcgcttccctgaccggagctacgatgcctaagaataccgcaccggatagttacaactatctgggaagttggctgggtaaagaaaagacagaccgcccgtgggtaatagagcaggcttctaatcacacgctttctgtccgcaccaaagactggaaatacatcgaaccgaatgacggaccgaaaatgattcaatggggaccgaagatagaaaccggaaactctaaagaaccccagctttataagatgaaagaagtgaaagaggtaaccaactatgcaaagaatatgccggagaaagtggcagaactgcaaagtatccttcaaagcgtacgcgaaggaaaggacttaatcgggaaataattccagatatgaaacactgaaacgcttttattttaatgacaacaatatcatgaattatcaatcaatcccgttgataggcagtgccctgctcctatctaccctatctgccaacggacagaaaaaaaatacccagcccaatatcctcttcatcctttgtgacgatatgggatatggagacttaggatgctacggtcaaccatttatccgtagccctcatatagacgccatggccggtgaaggaatgcgttttacgcaagcatacgcaggaagtcccgtcagcgccccttccagagcttcattcatgacaggacaacattcaggccattgtgaagtacgaggtaacaaggagtactggaaaaatgcaccgatcgtggaatatggacagaataaagaatactcaatagtggggcaacacccttatgatcccgaccacgtaatcctgccggagataatgaaagataacggctataccacaggtatgttcggtaaatgggccggaggttacgaaggttcctgttccactcccgacaaacgggggatagacgaatactacggttatatctgtcagtttcaagctcatctttattatcccaatttcctgaaccgttatagtaaagcattgggtgacaccggagtggtacgtgtagtgatggatgaaaacatccaatatccgatgtatggtcccgactacctgaaacgtccgcaatattcggccgacatgattcaccagaaagcattggagtggctggatcagcaagacggcaaacaaccgtttttcggcgtattgacttacaccttacctcatgcggaactcgttcagccggaagattctatcctgaatgaatacaaagctaaattcaacccggataaagaatttaagggaagcgaaggctcacgatacaacgccatcacgcatacacacgcccaatttgccggaatgattacccgcctggactattacgtgggcgaagttttgaaaaaactgaaagaaaaaggactggacgaaaacacattggttattttctccagtgacaacggccctcacgaggaaggcggagctgatcctactttcttcggcagagacggaaaactacgcggactgaaacgtcaatgtcacgaaggaggaatacgtattccatttatcgcccgttggccgggacacatacctgcaggcgaagtaaacgatcacatctgtgcattttatgatttaatgccgacgttctgcgaagttatcggtatcaaagactacgaaaagaaataccgcaataaggaaaaagaagtcgattatttcgatgggatttctttcgctcctacactgctgggtaaaaataagcaaaagaaacatgactttctgtattgggagtttgatgaaacagaccagattgccgtacgcatggatgattggaaaatggtagtgaaaaaaggaacaccgttcctctataatctaaaaacagatattcatgaggatcatgacataacactccaacatccagatatcgtggaaaagatgaaggctatcatctttgaacaacatactccgaatcctcatttttcggtgacgttgcccaaacggtaaacacacagataaagaaataatgagtaatcagcagttggaaagcaagttatcattcattcctatacggttttcaccacagaggacacggagggtacagaggtgaatcttgttcatgccggtactgaaatgaactaatttcgagcttgtgcagatttatttttgatacctaatggggttatggctaatgatatatagatttattcgtctgacaattgtcagacgaataaatctatgtataatgaatattaaatcatcgcatattaccaattaaatcttagaagaactaagattagttcattcctgccttgttttactccaattcaactactgattcgcataaatcagtgtctgaatactataggattacgatgcctgattttatatatgttccgtccttctatcagcgaataggcgtcattcccatcttctttgcccgttccagcatgaaagcatgagccgcctcatattcattcggaatcactccatccaagattgcatctttgatagcactcttcaagactccgacctcacgacaaggttccaagccgaaaatctccataatttcttctccgctcacaggtggctggaaattacggacacggtctttctcttccaaatccttcagtttctgtcgaaccaactggaagttattcaggaaacgctgtttacgttccatattcttggaagtaatatccgcttcacaaagcatcatcaagtcgtcaatgtcatcacccgcttcaaagagcagacgacgtacagccgagtctgtcacgacatcatctgcgataacgatcgggcgcatgtgcaggctgaccagcttttgtacatacttcatcttctcattcatcggcaacttcatcttgcggaagatatgcggaatcatcttttcaccgataaagttatgattatggaacgtccatcccgctttaggctcccaacgtttcgtggcaggtttggcaatgtcgtgcaacaaagcagcccaacgcagccaaaggttatcagtcttcttgctgatattatccagcacttccaacgtatgataaaaattatccttatgggaacgtccgttccgtgtttccacaccctgcaaggcagcaaattccggaaaaatcaacggcagcaaaccgctacgctccaaatcaataaatccttttgaggggattggagaaagaataatcttattcagttcgtccgcaatacgttcacgggatataatttcaatccgttccttattccggcaaagcgattcgaaagtatcatcgtcaatgtaaaaacccaattgcgtagcaaaacggatgcaacgcatcatgcgcaagggatcatcgctgaaagtaatatccgggtcgaggggagtgcggattgtcttttccttcatatcctccaaacctccaaacggatctaccaattcaccaaaacgtgctttattgagacatacggccagagcattgatcgtgaaatcgcgacgattctgatcgtcttccagcgtgccgtcttcaacaataggtttacgcgaatcccgttgataagattctttacgtgcaccaacaaactctacttccgtgcctctatattttacttgtgctgttccgaaattcttgaaaacagaaacatgagcaccacgtcccaactgttttccaagggcttccgccattgcaattccacttcctacaactactacatctatatctttagagggacgttgcagaaaaatatcacgaacataaccacctaccacataacactccataccgagtgtatcagccgtttcggctatctgtccgaagatgggttcgctaaaatgctgcttcaattcctcttgagtcaactctatcattctttttagttataagttttgaggggacaaaattacaaaaataagggatatatttgtatttttgccgctaataaaaccagtaaatagaatttgtgatgaaaaaactgattatcctcttttgtggtacgctggcattagctgcctgcggaaatggccttgagaaaaaagccaatgaaaaactgatggttgccaaggctgcctacgaacgtggcgactatgaagaagctaagttacaaattgacagtatcaagattctctatcccaaagcgttcgaagcacgtaaggcgggacaggcactgatgctcgatgttgaaacaaaggcacagcaaaaaacgcttgcttacctggatagcgcctttcaggcaaagacagaagaattcaatgccatcaaggacaaattcaaactagaaaaagatgccgaatatcaacaagtcggcaactatctctggcctacacagaccattgaaaagaatatgcaccgttcgtacctccgcttccaagtgaacgagcaaggtataatgagtatgacttccatctactgtggtgccggcaatattcaccatacaaaagtgaaagtgattgctcctgacggcagttttgcagaaactccaagctccaaagacagctacgagacaacggatatgaacgagaaaatagaaaaagctgactacaaactaggggaagacggaaatgtgatcgaattcctgaatctcaataaagacaaaaatatccgtgtggaatatataggcgaccgcacctataaaacgacaatgagtccaaccgaccgccaggccgcagcaggtgtttacgaattagcacaaatcctctcggccatggaacagattaaaaaagaacaagaggaagccaacctgaaaatcggattcatcaataagaagaaagaacggaaagcacaggaagaaattaccgattagtaaaaggaaagccatccaccagaaaaagccattggttaataataaaatagacgggaatagttgttatttttcataaacgacaactattcccgtcaaatgcataatgagactcttaatcctctgcgtgagagaaaaggcgtttcctggtagggagaaaaggcgtagtctgccatcatcaaacggcgtagcctgataaccaaaaacggcgtggtctacacgcctttattttatccttctattcaactgattattagccttttcctgctttgattttccgacccgttttccggtcgtcttctttttaccgactgcagactttgtctttccggcaaaaggattgttactttttttgattaacatagacagcacttatataaacagtacttatttcttataattcttattctccttcgtaatactcacccaaaaaccagcgagccacaaaatcccagttttcctgcaataactcctttccgttctcaaacgggaactgtgcttccggcaacaaatcgtgttccattccatatttcagcagatcgaacggacacaaaccttcttcacaaaacagctcgtatgcttcctcttcagccagttcggcattgtagagcggattacgtttgtctgcaaaatattcggctacatcaggaccgatcaacaaccctttcggattggcaaaaaccacaaagttaccgaactcctttaagtcaggcaacaaagaatcctcttcatcttcccacttcaacgattgcacaaagaaatatttcagcgcttcgtaagagtcaaagtataaaagcggttcacctttgctcgcttcaaggaaacgttctacgttcgtaggcatcttttctcccggcaaagctaccggcagaggcatccgcttcttttgcatcagctccgtttccatcagccagtccgttgccagataatcgctgataggagccaattcgaacgcagcatccaaacggttgtaaagcgtatccgcaaactccagcaaatccgcatccatcgggttctctactccatcaaaatcatcgccaaccggagaattgatggcccacaaaaggaaaacaacatcttcacggttaatttcgtccggcaaatattcctccgtcagtgcgtaaaaaggcaaataacgtccgtagcttttccggtgccaatgaataaactgacgccaatttcctccgtctgctacgcaatcttccaaatacaaggcacacgtcaaagccactcgcttctggtcttcctcccactctctcccaccgtatataaaagaatctgccaccaacggcaatagctggttagcgaaatccagataccattcatccgtatccactgcttttgcacgaccatgagcgtccagccatgctttcatatatatcttctgttgcttcatactacaaacgtttcaaagccagtttgataaccttttctaccggagcatccggctcctccttcaagatagccaacaccaccttctgtgaaggcgcagcagcaaagcctagcatcgtcaatgcagacaccgcctcttcctgcacttccacattggcaggttgtaacaacaaacctgcggaagcccctccggcagcagacgttcccattgtttttatcttatctttcaggtcgacaatcacccgttgcgcggtcttcagtccgatgcctttcaccgttttcagcatgttcgcattttcggtgctgattacgttcaccaattcggcaggcgagagagccgaaagaatcatacgagccgtgttcccaccgattccggaaacggaaatcaataatagaaaaatctcccgttcctgtttctcggcaaatccgtagagcacatacgcatcttcacgaatcgcctcgtaaatatatagcttacagcttttctttccctgaatagccgaataggtattcaaagatatattggcggcatatcccaccccgttacagtcgatcaccgcggttgccggacttagttcggcaagttcgcctctaatatattctatcataacagggacaaagataaaactttctcaccacagattacactgattttcacagattattcttttgtgcattagatatgaagaatatgaaaaaaataaaaatattaaagcaaatgaaccaaagttagtagtaatttgtttacttttgcaagcaaaagaaagaaatttgttcattaaaaccaagaaaagaatgaaaaaagtaagagctgccatcgttggttatggcaacattggacattatgtacttgaagcgcttcaggcggcacctgatttcgaaatagccggagtcgttcgtcgtgcaggagcagagaacaaaccggaagagttagcaaactacgcagtagtgaaggacataaaagagctgggagaagtagacgtagctattctttgcacgccgacccgcagcgtagaaaaatatgcaaaagaatatctggcgatgggtattaacacggtagacagtttcgatatccacaccggtatcgtagacctgcgccgtaccttgaatgctaccgccaaagaacataaagccgtatcgatcatctctgccggatgggatccgggaagcgactccatcgtacgcaccatgctggaagcaattgctccgaaaggcatcacctacaccaacttcggtcccggtatgagcatgggacacacagtagccgtaaaagccattgacggagtgaaagctgccctttccatgaccattccgaccggcacgggaatccaccgccgcatggtatacatcgaactgaaagacggatataaatttgaagaagtagccgctgccatcaaagcagatccttacttcgtgaacgatgaaacacacgtgaaactcgttccgagtgtagacgccctgctggacatgggtcatggtgtaaatctgactcgcaaaggtgtatccggcaaaacacagaaccagttgttcgaatttaatatgcgtatcaataaccccgcactgaccgcacaagtactggtatgcgtggcacgtgcttccatgaagcaacaaccgggatgctacacgatggtagaagttcccgttatcgaccttctccccggcgaccgcgaagaatggatcggacatttggtataatatattttatacataaaacaaaattaaaatagagaaaggcggtacacctttctctattttttttatctttgtgagcatactacaaaaaacacaattatgagaaaactattcattctctgcgcatttctattacagctcctgtcgcctgtctacccacagcaagccacaacagccaccatagagcccaatctgaaatacggaaaaccctccaaagaagaactgtctctcacctcttatgccccggacaccaccgctacggctatttatctcttccatcagggacaaagtgacttcatctaccatgacggttttcaactaactaccgagcactgggtacgcatcaaaatcctgaaaccacaaggagtgtcatacgccgacgtgtccgttccctactactctcctaccgataaagatgaaggacaggaaagagccagtgagatagaaggctgctcctacaatatggaaaacgggaaatgcataaaaacacccatgaagcgggaatccatctctttcgaacggttcaataacctgtataaaatactaaaattctctttgcctgctgtcaaagagggcactatcatcgaatatcactacaaactctactccgactatttctcacacatcgacaactggatgatacaggaagaactcccgatgctctacaaccagtataaaatcaccatccctcatgtatttgtctacaacatcgaactccggggaaaggactacatacaagtgaagcaaagagactcctccatccatgccacggaacgtgaaggctccggtgcgggtggagtcagcaaagacttcaccgtttcggcacaagaaaccacctttatctcacgcaaccttccggctatccgtcaggacgaatcctactgctggtgtccggaagactataaggtgcaagtgagcttcgatctgcaaggcactcaattcacccccaatgaatacaaaccatacagccagaaatgggaagatgtagacaagcagttgctcaaaccggaaaatacacagttcggcgaacacctctcactcaccaaccctttccgccctgaaaccaaacaagcctacaacagcgaaatgaatttcgaggagaaaatcatctgcgccttccaggtgctcaaaaagaaaatggcctggaacggacggtatcagctctacagcaaagagctcgaaaaagtaatcaagaaaggaagcggcagtaatgccgacctgaatttcatccttatcagcatcctgaaagactttggactggaagcctatccggtggttatgagccgacgttcatcaggtatgctgccgtacaactttccttctctgcaaaaactaaatacgttctttgttgctatccacgatataaacaaacaaaaatatgtatttttagacagttctatggacgtacctgcctttaatatattaccgcttgaattgtctgtaaacaaagcacgcatcctttcccggaaagagaaagaagagaataaatgggtgaatgtgatggctctttccaacaacaaaagtttcatgaaaatcgatgcccgaatagaaggagatcaggtgaaaggacatcgcagcacagttctttacggacaagaagctatagagtatcaggcaaatgcaaaacataagcaggacagcctcgtctcgaatcccgaaaacaagatcagtagtcagaaagagcaactcactgtcaccaacctgaaagtgaaaaaacaagaaaatgactgggcactgatagaagaagaattcgatttcgtcttgcaagtcaaccggacggacaatcatctttatatcaatccgatgctctttccgcaactaaagagtaatccgtttatccagacggaacgggtgctccccatcgaatttccgtatccgtacaagttcacgatgttgtctacgctgactctccccgaaggctacgaagtggaagaactcccccaaccacaagccatccggtcggaaggagacggcctgcaatgcaaatatatgattcagaaacagggaaatacaatcctgctcaattatgtattccacttaaagggatatatattcctttccgaacaatataaacaactacaagaactgtggactaaagtgatcgagaaaaataatgcgctgatcgtactcaagaaaatataaactttacctatctataccgatgatccgttccagctatctcatcctgaagcaaatgacacatcgggcattcagcctgtcctgtgtccttatctgcctaagtctgcacatacagccggcatgtgcacaggatattctcaaggatgccaattccgttatcgttgaagcacgcacagaggttctctgcaaatctatgacccaatccatagaaaaagagagcctgacaatcaccatcctcaaccgtaaggggttggaagctgcacatttcttctgcggatgtgatatgttccgttctttgcagaaattctccggggaaatcatcaatgccgatggacaaagtgtacgtaagataaagaaatctgaactacagaaaagtgaatacagctcctcgcttagcacggatgattatttttatttttacgaatgcaattatccttctctccctttcacggtgaaatacgaatgggaagtgaagtgcaacaacggtctgatcggctatcccccctttataccgctggcagacttcaaccaaggtgtggaaaaagcgacttaccggatcgaactgcccgcaggacaaggatgcagatatcgtgaactgaacacgcaaggaaaaggaatccaggtaaaagaatccaccggagccaacagacagcaagtgattgaagccaccgcctccaaactctctcccatcattaaagaacctttcggaccggattttactgaactgtttccacgtgtctattttgcgccttccgccttcaagtacgacaagtcggaaggcgatatgagcaactggcaaaagtacggagaatggcaataccgattgctcgacgggcgcgacctgctcaccgaacctttccgcgccaaactgcacgaactgacagcccactgcactaccgaccgggacaaggtgaaagcaatctacgattatctggccaaaaccacccgttacgtgagcatccaactaggtatcggaggtttacagcccattgccgccgccgatgtttgccgcacgggattcggcgactgtaaaggattgtccaattacacccgcgccatgctgaaagagttgggaattgcttccacttatacagtcatcagcaccaccaacgagcgtttactaccggacttctccagtgccaaccagatgaatcacgtcatcctacaagttccacttccccaagatacgctctggctggaatgtacaaacccatcgtttcccttcggttatgtccaccaagacattgcgggacacgacgccttactcatcgaaccgaccggcggccagatgtatcgcctacccacctatcccgactcactgaacacgcagcacatcgttgccaacatcaccctctcccccacagccgaggcacggatagaggtgaacgaaatctcccggattttccaatatgagaatgaagcaggcatcgtctatctggagcctaacaaacagaaagaccgcatccgttcaagcatcaacttatcccaagccgatattcagaacctgcaaatcagcgagtgcaaggagcccaatccgtctatcaccttcgactacactgccaccagcaatcaatacgggcataaaacgggcaaccgtctgtttatccccaccaatgtgttccgaaaagaattcagtgttcctcctgtgacgaagcgcacctatcccatttacatcaactacggatacacagataccgacagcatccgcatccaactgccggaaggatatgtaatcgaaggacttccgaaaccgcttgacgtgaaaagcaagttcggcagtttccattccggtattcaggtgaaagataaggaaatctacatcactcaccgattgtttatgcgcaaaggggtttacagtccggatgaatatgcggcattcattgatttccgcaagcaagtggcaggacaatatggaggaaaaatcattttaaaaaaagaataaggagggaaacgctttacagaaaataaagtatctttgcgactcaacattttttgtgacttaaccattcaaaaaaaggaacattgaagaacaaacgatacaatcatatagaagaatgggcaaatacccttagccacggaataggcatcctgcttggaatcgtggccggatatttcctattggaaaaggcttccgagaatatggaaccgcagtgggcagttgcttgtgtatccgtctatctggcggggatgctttcctcttatatcagttctacgtggtatcacggcagccgtccgggaaagctgaaagagctgctccgcaaattcgatcatggagctatctacctgcacattgccggaacctacactccttttaccctgctcgttctgcggcatgccggcggatggggatggggaatcttcgctttcgtctggctgtcggctatcgccggtttcattcttagcttcaaaaagctgaaagaacacagcaatctcgaaacggcttgttacgtaggtatgggcgcctgtatattggtagccatgaaacctttgttagatcatctgggagaactgggagccactaccgctttttggtggctgattggcggaggagtttcgtatattgtgggagctgttttttattcattgcgcaaaccctatatgcatgccactttccacttgttttgtctgggaggcagcatcgggcacatcattgccatctggctgattctgtaaggaatggtagggacaaaaaaaaggctatctatcccagacagccaatctttgttaaccttaaatctaatactatgaaaaacacagtacaaagatacggacttttcggtcatctccaaattttcaggccaaagcagcctaacttataacacggtttaataaaaagcagaggttcgttaacgtttaacgcaataaagttaaaaattaacgaatcgtttattaacgatttaaatgattgaattgccgctaatgagttttttccttctgaatttgaaacgaacaaacaaacagattcacaaattcgttatatagaaaagaggaacttaaaacgaaaacgatttagaacgcaaatttatggattggaaaaatcacctgataaaacacctgcaatggtcggactccatcatcaaccgggaggcaaaagaacacgtagcccgtgaaattgccgccacggcaaaagacggagatgtgataggagccggctccggctctacagtctacctgactctgttcgaactctcacgacgaattcgtgaagagtacttgcatatcgaagtgattcccgcctcacaagaaatctcgatgacctgcatacagctaggcatcccccaaactaccctctggaacaaacgccccaactggacattcgacggagcggacgaagtagatccgcaacagaacttgattaagggacgtggcggagcgatgttcaaagagaaactactgattagaagcagccgcaaaacgttcatcatcatcgaccccagcaagcgtgtgaatcagctgggaagcaaatttcccatccctgtagaggtctttccggactcactgacttatgtagagcatgagttgcagcggctgggtgcctcggagattgttcttcgtcccgctcgtggcaaagacggacctatctttacagaaaacggcaactttatcctcgacacccgtttcaactacatcgactcttcgctcgaagaacaactgaaggcaatcaccggtgttatagagagcggacttttcataggttatgacatcaaagtgatcgtggcggaataaaataacacaagctgaaaatcccattttgtagagacgtaaatttgatttgttctaatgcaaattaaatagtatagctttacctttattttagttagtagaactaggttatctgacacccgggtctcagacataccgacacccgggtgttgggtatgctgacacccgggtgtcaggcatcatgagacccgggtgtcagacaacttatacttgcagtcttttgcattcttctttactatcactcataatttcaatcactattagattgtaacatttaactcatacctccaaaacacgaatattaaaaaacgcctagataaagaaaaacaccgggaaatttattaaaaatttgggtagaatattaatcccttctcaaaaatcaatgagaagcaaagactactaaattgataagaattgataaaggaagtttcaataaaagaaaccggaagaataggttaatttttaaaatccgaaacaaaaacattgaaaaacaacaagataggagaaaaaaagcagaaggaaaggagaaaagaaaaatcaataagtcttagcagaacttggtacattcgtgattgtaaacttaccgtcaatatcagtgatagtaccaagggtagtgccattcaccaatattgaagcacctacgacaggttgcccatcttcttcagaggtaaccaaaccggtaactctggatgtttgcgctgtcaccagacctatacctataaaaaggaaggtcattaagaacatcaattttcttttcataaattctctcttaaatttaacctataaacagattttttgtctctaacaggttgcaaagataacacgaattatgacaaatcgaaaaaagtgttacgtatttaactaaaaagtatcgttttgaaagcaataagtttctaaaaactgataggttaaaacaacttcttttaaatttagcatcttttaaaagatagtttctgtcataaagatagcaccaaaatcaggcttttcaagaaaaagagaacattattacctccaaaacggtatctttttatcattttgcaccttcaaaagggttaaagaactattaacaatgataaaggcagaaacttctacataccaagttctgctaaaactttgcgcgtttcttatgtaggaatgatttcgcaagacgtttccatcaaaccgggagtgataaaagttgttttgaaaagcgacgcgaaggcactggatgaggttgtggtgacagccatgggtatctcacgcgagaaaaaagcactgggctacgccgttcaggacgtaaaatcagatcaactgacgcaagctgccaactctaatctggcgggagcgttgcaaggtaaggtgtccggtttggacgtgaagccttcaagtggtatgccgggagcttcttcacagatcaccatccgtggtgcacgttctttctcgggtgacaacactccgctttacgttatcgacggaatgccggtgaccagtactcctgacgttagcacagatatccagaacaatggtagtgtgagcggagcggacttcgccaaccgtgcagtggatatcgaccctaatgatattgaaagtatcaacattttgaaaggtcaggctgcttctgcgctttatggtatccgtgcttccaatggtgtgattatcatcacgaccaaaagtggtaaaggattggaaaaaggcaaaccgcaggttagcttctcttctaatgtcagcttcgatgtagtcggccgtctgccggagttccagaaaacatacgcacaaggttcgggtggaaaattcagtcccacttcgggaacctcttggggacctaaaatttccgaacttcccaacgatgcaacgtatggtggtaacacggacaacaaatacactcaacagtacggtaagcaacagggaaaatattatgtaccccaacgtgcgtcagccggtcttgacccatgggccactccacaggcatacgacaatgccaaagatttcttcgatacaggaattacctggagcaactcactgaatgtcgcgcagatgctcgaaaaaagttcctactctatctcattgggaaatacgcaccaggacggtattatctcaagcaccggtatggatagatataatgtaaaggttagtgccgacaccaaactgactagtaactggagttccggatttacagccaactacatcactacttccatcgacaaggcagtgacttccggtaacggtctgttgagaacggtttacgcagctcctcccagttatgatctggccggaattccaagccatgtagacggcaacccgtacacacaaaattctttccgtggtagctttgacaacgcttattgggcgatggaaaataataaattcacagaagataccaaccgtttcttcggaaacgtatatacaagctatcagactgatttcggcacaactaaccacaagttgaacgcaaaatacatggtcggtgtggatgcttacactactcactacgtagacagctacggatatggtagtaacactggtggcggtcgcggacagatcgagaactacggctggacaaacgctacatataactcattgctgaccatcaactacgactggcacattaatgaggactggggactgaatgcggtagtgggtaacgaaattatccaaagcaacagaaagaagtattatgaatatggtacgaactacaacttcccgggatggaaccacatcaacaacgccactactcaacagacagaagaagagacatggaaaaaccgcacggtgggattcttcggtaacgtatcagcttcttacagaaatatgctttatctgaccctcaccggacgtcaggactacgtatctaatatgccacgtaagaaccgctcattcttctatccttctatttcggctggttttatcctgacggaattggatgcattgaaaaacaatgtcgttaatcacgctaaattgagagtatcttatgcggaagtaggacaggcaggagatttcctcgaaaactactactcgactccgacatacggaggtggtttctatatgctgactccaatcatgtacccgatgaaaggcactaccgcctatactccgtactacacgattttcgacccgaaactgaaaccgcagaacacacgttcgtatgaagtgggtgctgacgtgaacttcctcgataacttaatcacattcagttatacgtactcacgccagaatgtaaaagaccagattttcgaagtgcctttggcttcttctaccggtgctagcaaactactcaccaacggtggaaagattcataccaacacgcatgaattcactctcggcttcaaccccatccgaacgaagaatatcaactgggattttgcattcaactggacgaaaatcgataactacgtagatgaactggcaccgggtgtagaaaatatctctctgggtggttatgttactccgcaggtacgtgcttcggcaggtgagaaattccctgtaatctatggggtaggcttcaagagagatgaaaacggtaatcgtctggtagacgaaaacggtcttcctatcgctggtgaagcacaagtaattggtaaggtttctccggacttcctgatgggtttcaacaccacattacgcttatggaagtgtacaatcagcgcagtacttgactggaaacagggtggccagatgtacagcagaacaaccggactggcagactactacggtgtcagcaagagaacggaaaaccgcgaaggtaccatcatcttcgacggatacaaaaccgatggaactaaaaatgatatcgccatcacaggtgcaaacgcacaacaggtattttacagccgcctgaacgatattgacgaatcttctgtatatgacaattctttcatcaaactgcgtgaagtagctgtcaactacaaaattcttcaaaaacgttcgatagaactttctgtaaacgcatttgccagaaatatcctgatctgggctcaattgcctgacctcgatccggaagccagtcagggtaacaacaacatggcaggagcatttgaagattattcaatgccgcagacagctagtttcggctttggtttcaacattaaattttaatctgcaagacaatgaaaaaatataaatcaataggaaaattgctggcagtttctttcttgactgctgccattgcttctgcttgtacggaagacgcaatggataaaatcaatgaaaaccctaacaatcctctggatgcgcctgcaaaatttttgattacggacttaggggtaagcactgcattcagcactgtgggaggggatttctcgctctattcttctgtttacattgaacacgaaacgggtatatccaaccagctttaccgggcggaagtacgtagcggagagcctacaacggctactacctacaacaacgcatggatcaacgtgtattcaaatatcaagaacgctaaaatcgttatcaagaagtgtgaagaagatccttcggaaaaaggaaacgtagtgacggaagcaattgctaaaatcctgctcgcttacaacggagcagtggctgccgatgtatttggaaatacaccgtacagccagactggtatcctcaatccggacggcacaccaatgtatatgcagcccaaaatagatacgcaggaaagcatttatcaggaagtgatgcagaatctggatgatgccatcactctgctggataacggtactgccaaagatgcaggtctgtccggcgcagtcggttctaaagacttgatctacggttcaaacaccagtactcaagcaagtatgtggctcaagacagcttatgcgttaaaagcacgctatacaatgcgtctgctcaataaaagtgccaataagacaactgatcttcagaacattcttacttatgtgagcaaatcatttgctaatgcaagtgaagaatgtaaactggctgtttatgacgctgattcgcagttgaatccgctttggtcattcagctatagccgtaacagtttggcagccagtgccagtctgattgaaaagtttgttgagcgcaatgaccccagagcaccgcaagcatttctggagcccgatcccaccggctatattgcttatggatacggaggtacgcaagctacagacatcgcaggtatcaaagcggctccaaacggaactccgcaagagttgcagaacaattatggtatgtcaatgatatcatgggcaatgtcggctcctactcttttaatcagttatcacgaagtgaaattcctcgaagcagaagcattatgccgtttggggggcagactgggtgaagctaagagtgctttaaaagctgcaatcactgccggattcgagaatctggaaaactcaattatagatgccgctgacacttgggtatatgatggtgacagcgatttgggggcagatgtagcagaaacctatttcacggatgaagtagaaccgttattcgatgccaaccctctgcaagagacaatgatacagaagtatctcgccttcttcggtgcatccggcgaatcactggaagcctataacgactaccgtcgtttgaaaggtgcaggagaaaacttcattgtactgaagaacccgctgaacaacaataagttcccattgcgcttcggttatggagcagacgacgtattggcaaatcctgaagtgaaagctgctttcggtgatggccagtatgtatatagcgaagctgtctggtgggccggcggaaacaaataatgaacttaaaatctctcaaaggagagactttacatagagtcgtttctgtactctaacaaattaacagaggcgaacaaaaataggccaaccgtgaggttcgcctattttattttatccaatttcatcagatgaatgctcaaatataatagagaaaaaggaatattcaacggcatcttttacataccatttttctacccaatcatactctttttctacgctattccgtatttaacgtttaagcatcttttaaataaattaaaaaaattcccgtacgaatcaatttcaccactgcaaatcgggtagatatttgcttaaagtagtgcggagaatactcaaagtaataggtttcaccaatacttcagttgctcctgcgttcattgcattttccttatccgagctgaaagcataagctgtctgcatgataataggaatttcggtattagactcacgaattatcttcgttgcctccaacccgttcatcaccggcatcttgatatccatcagcattgctttggttctttcctggtgctgttgaaacaactccaccatttcctgcccatttttagcccactcgatatcacactttttgcctatgatagccttgattaatttaaagttgctgtcatcgtcttcagctactaaaattaagggtctgaattcattcatttgttcgctttccatatcgcttatatattgtttttttatctgtttttttggatcaatttcccttttcagcccgcaagttataaaaaagattcatatatttcgctatctttgcgcctcaatttaaaagaatagtatgatttctgttgacggactagccgtagagtttggcggcactactttatttagtgatatttctttcgtaattaatgaaaaagaccgcatcgcactgatgggtaaaaatggggcgggaaaaagtacgctgctgaaaattttggcaggcgcacgacaaccgacacgtggaaaagtttccacgcccaaagattgcgtagtggcctatctgcctcaacatctgatgacggaagacggaagaacagtgtttgacgaaacggcacaggctttttcacatctgcatgaaatggaagcgcagattgaaaaactgaacaaagagctcgagacacggacggactacgagagcgatagttacatggcgctgattgaagaagtgtctgccttgagcgagaagttttattcgattgacgcaaccaattatgaagaggatgtggaaaaggcattgctcggattagggttcacccggagcgattttcaacgccagacgagtgattttagcggtggatggcggatgcgcatcgagctcgctaagttgctgttacagaaaccggacgtactcttgctcgatgagccgactaatcatctggatattgaatctattcaatggttggaagatttccttattaataacgggaaagcagttatcgtaatcagccacgaccgcaaattcgtggataatattacaacacgtaccatcgaagtgacgatgggacgtatttatgattataaggtgaattattcccaatatctgcaactgcgtaaggatcgccgcgaacagcagcagaaggcatacgacgagcagcagaagtttattgctgaaacgaaggagttcatcgaacgattcaaaggaacatattcaaagacgttgcaggtacagagccgcgtcaaaatgctggaaaagctgcaattgctcgaagtcgatgaggaggatacttctgcattgcgactgaaattcccgccttcaccccgttcgggcagttatccggttatcatggaaggtgttggaaaggcatacgaagagaaagtggtgttccgcaacgctaacctgacaattgagcgtggtgataaagtagcttttgtcggtaaaaacggtgaaggtaaatctacactcgtgaaatgtatcatgaaggaaatcgaacatgacggtacactgactttaggacataatgtacaaatcggatatttcgctcaaaatcaggcttcgttgatggatgaaaacctgacggttttccaaacgattgacgatatagccaagggggatatccggaacaagattcgtgatttactgggtgccttcatgtttggtggtcccgaggaatcgatgaagaaggtgaaagtactttcgggtggggagcgtacccgccttgccatgattaaattgctgttggaacctgtcaacctcctgatcctggatgagccgacgaatcatctggacatgaaaacgaaagatatcctgaaacaggcattgctggattttgacggcacactgattgttgtttcacacgaccgtgacttcctcgacggactggtgaccaaggtgtatgagttcggtaatcaaaaggtgacggaacatctttgcggcatctacgagttcctcgaaaagaaaaaaatggattcgttgcaagaactggaaaagaaataataaataataaaaagagggtatcggctgcaggcggaataaaagtatttgtatatttgcactttaaagctctgaaaaagctgataacctctaaaagaaaggatgaaagggaagaaacgaataatagtaactctgctatttttaatcaacattataatgttggtggcagccgttattccccatcatcatcaccccaacggaatgatttgcatgaagcaggacttgcctgtagaacagcaatgtcccacacatcatcatcacccgggaaacgattcatgttgcagcagcgaatgtatgactcgtttctactctcccactccatccgtacatacggatagcggaccggattatgtattcatcgctaccctgttcacggatgtaatcatcgaacatctattacggccacaagagagacggattaagaactattacgtctaccgagactctctgcatggcacggatatacaccgtgccactcctcttcgtgcccctccctactctgtttttgcgtaaaagcgtaaatgcaaatcagttgcatttgcgttaccttatctttgtagcgtaaaaaaacagtaaaatttagtaggaaaatatcattatgaaaaaacttattttcgtaggaatcctaggcttattcgtgctgggttcctgtaataatagtaccgtcacacacacacacaatgaacacgatcatgccacggaaggacataatcacgaggcagagggttccgatcattctcatgaaggcgaatgtagcggagaacacaaccatgaagcggccgatggacataacgagtctgccgaagcgcacagtgatgaaatcatccttccgaaggcaaaagctgaagcagccggtgtcaaggtgagcgttatcgaacctgcacctttccagcaagtgattaaaaccagcggacaggtgctggctgcccaaggtgatgaatcggttgccgtagctacagtggccggcgttgtatctttccgtggaaaagtaacggaaggaatgagcgtcggcagcggcacgccgctagtcacgatttcttcaaagaatatcgccgacggtgatccggtacaacgtgcccgcattgcctacgaggtatctaagaaggagtacgaacgtatgaaagagcttgttaaaaacaagattgtatctgacaaggattttgcacaggcagagcaaagttatgaaaatgcccgccttagttacgaagccctttccaagaatcattcggctatcggccaaagtattacagctcctattgcaggatatgtgaaaagcattcttgtgaaagaaggtgactacgtgaccatcgggcaaccgctggtgagcgtgacgcagaatcgtcgtcttttcctccgtgccgaagtgtcggaaaagtattatccatacctccgtacaatcagttccgccaatttccagactccttataataatcaggtgtacgagctgaaagcattgaacggcaaacttctctcttttggaaaagctgccggagacaactctttctatgtgcctgtcacttttgagttcgacaataaaggggaagtgatccccggatcattcgtagaggtgttcttgctttcttcaacgatggaaaacgttctttctctcccacgcacggcactgacagaggaacaaggtatcttctttatctacctgcaactggacgaagagggttataaaaaacaggaagtaacgataggagccgacaacggtaaaagtgttcagatcctgaccggagtgaaggctggcgaccgtgtagtgaccgaaggtgcttatcaggttagactggcaagtgctagcaatgccatcccggcacatagtcacgaacattaaagcggcgaggtgccgcagccggattttcttgcggcgcatctatcaagttatttataactctcaattaatgaaatatcatgcttaataaaattatacattactccctacacaaccggttggttgtagtctgcgcggccatcctcctgctaattgcgggaacgtataccgccatgcatacggaagtagacgtattccccgacctgaacgcacctacggtagtcatcatgacagaggccaacggtatggctgcggaagaggttgaacagctcgtcacttttcctgttgaaactgccgtaaacggagctacgggtgtacgccgtgtccgctcttcttctaccaacggattttctgttgtctgggtagaatttgattggggaaccgatatttatctcgcccgccagattgttagcgagaagttagcagtggtgagtgaatcactgccggtcaacgttggtaaaccgacactcggcccacaatcttccatcttgggcgaaatgctcatcgtcggtctgactgctgactccacttcgatgctcgatcttcgtacaattgcggactggactatccgtccccgtctattgtctaccggaggagtggcgcaggttgccgtgcttggaggagatatcaaagaatatcagattcagctggatcccgaacggatgcgtcattacggcatttcgatgggagaagtgatggctgtgacacaggatatgaacctgaacgcaaatggaggtgtgctctacgaatttggaaatgaatatattgtacgcggtgtactttcaacttccaaaacagaacaacttggcaaagcggtagtaaagacagtgaacaatttccctgtcacgctggaagatattgcggacgtaaccatcggaccgaaagccccgaaactgggaactgcttcagagcgtggaaaatctgccgtactgatgactattaccaaacagccggctaccaatacgctggaactgacggataaactggaagcatctttgaaagacctgcaaaagaacctgccaccagacgtaaaagtttcaacggacatattccgtcaaagccgctttatcgaaagttccatcggcaatgtgaagaaatcactctttgaaggaggtatttttgtagtaatcgtactcttcctgttcctggcaaatgtgcgcactacattgatttcattggtaacgctgcctctttccctgcttgtttcgattctgacgctgcattacatgggactgacaatcaacaccatgagtctaggaggtatggcgatagccatcggctcattggtagacgacgccatcgtcgatgtggaaaacgtatataaacgactgcgggagaaccgtcagaaagcagaagcggaaaggttaagtacactcgaggtggtattcaatgcttcgaaagaggtgcggatgcctatacttaattctacgctgattatcgttgtcagctttgttccgttgttcttccttagcggaatggaaggcagaatgttggttccgctgggcgttgcctttatcgtggcattgttcgcgtcgacagtagttgctctgacgctgactccggtgctctgttcttatctattaggaagtaataagacgaacaaggaactgaaagaagctcctgttgcccgctggatgaaagggatttatgaaaaagcactgacttgggtactggcacataaacgtgtgactctcggaagtacaatcggactttttgtagttgccctcggagtgtttttcacacttggacgcagcttccttccttcgttcaatgaaggatcgtttactatcaatatcagttctctgccaggtatttcgctggaagaaagcaacaaaatgggacatcgtgccgaagagttattgatgacaattcccgaaatacaaacggtagcccggaaaacgggacgtgccgaattggatgaacatgcgttaggagtcaatgtttctgaaatagaagctccgttcgaattgaaagaccgctcgcgcagtgaactggtagctgatgtacgtgaaaaattaggtacgatcaccggagcaaacatagaaatcggacaaccgatcagccaccgtatcgacgcaatgctatcgggtacgaaagcgaatattgctatcaaattattcggtgatgacctgaataaaatgttttcactcggtaatcaaatcaaaggagcgatcagtgacattcccggtgttgccgacctgaacgtggaacaacagattgaacgtccgcagctgaaaatacagcctaaacgggaaatgctggctaagttcggtattaccctgccggaattttcggaatatgtgaatgtagctttggctggaaaagtgatctcacaagtgtatgaacagggcaagagttttgacctgatcgtaaaagtgaaggatgatgcccgggatgaaatagagaaaatccgtaacctgatggtagacacgaacgacggccgcaaagttcctttgagctatgtagcggaagtggtatcggccatgggtccgaatacgatcaaccgcgagaatgtgaaacgtaaaattgtcatttccgccaatgtggccgatcgtgacttgcgcagtgttgtgaatgatattcagaaacgtatcgacacatcggtacaattacccgaaggttatcatatcgagtatggtggacagtttgaaagcgagcaggctgccagccggacattagcgttgacttcatttatcagtatcgtggttatcttcctgttgctgtacaatgagttccgcagtgtgaaagaatccggggttatcttgctgaatcttccgctggcactgatcggtggtgtatttgctttggtgattacaacaggagaagtcagtattccggctatcatcggtttcatttccttgttcggtattgcaacgcgtaacggtatgttgctcatcagtcactacaatcatttgcaaaaggaagaaggtttgaatgtatatgatagtgtgattcaaggttctctcgaccgcctgaatccgattttaatgacggcattgtcttctgcactggcactgattccattggcacttgccggcgacttgcccggtaacgaaattcaaagtccgatggcaaaagtgattctaggaggattattaacgtctacttttttgaacggttttatcgttccgattgtttatctgatgatgcatcggaaaaaggcccagaaaagcctgtagagagggatatttttcctcggtgagaaaaccatcgttccccggtgaggaaacaagtgtttctcggtgaggaacgggtcgttccccggtgtcaaacaaatagatgccttatcataaagtatctatcaacaatagcttgtaataaataaagaaattagaaatgaaacaaatcatgaccataagcgctgcacttcttttcttaaccataggtgaagtgcaagcccaaaacggaattgaacaggtattgaagaatatcgaaacgaacaataaggagttgcaggcaaacgagcaactgattacctcgcagaagctggaagccaaaacggataataacttgcctgaccctactctctcttacgcgcatctatggggagcaaaagataaaagcgaaacaatcggtgagctggttgtttcacaaagctttgatttccctagtttatacgccacacgtaacaagttaaaccgtctgaaagccggaactcttgacagtcagtcggatgtttttcgtcaggagaaactgttacaggcaaaagaactttgcctggacattatcatgcttcgtcagcaaaagcatattttggaggaacgtctccgcaatgcggaagaacttgctaaaatgtacgccaagcgtctccaaacaggggatgcaaatgctctcgaaaccaataaaatcaacttggaactgttgaatgtcaaaacggaagcgtctctgaacgaaacggcacttcgcaataagcagcaggaactgaatacgctgaatggtaatattccagtggttttcgaagaaaatcaatatccgactataccgttcccaagcgattaccaaatgttgaaatcagaagtcatggctacagaccgtaccttaatggcactaggcaacgagagcctcgttgcccgtaaacagattgctgtcaataaatcccaatggctgccaaagctagaactcggctaccgtcggaatacagagactggtgtgcctttcaacggtgtagtggtgggcttttccttcccgcttttcgaaaatcggaataaggtgaaaattgctaaagcgcaggcactcaacatcgacttgcaaaaggataatgctacactgcaagtggaatctgaattggcacaactttaccgggaagcgaaaacgctgcatgcttcaatggaagaatatagcaagactttccagtctcaacaagatttggcattgctgaaacaagctttgacaggtggacaaattagtatgatcgagtacttcgttgaagtatcggtgatctatcaaagtcatcaaaattatctgcaattggaaaatcagtaccaaaaggcaatggcacggatttacaaaagcaagctataaataatacataaaaaccctttaggtatgggttacgctgaacatactaatttctatttttaagttatataagtatgtttatataataaattaggcacggattacacagaattcacggtctttagtattgtcataactataaagcaacagtgttaatccgtgtaattcgtgcctaaatatatctcctctctttttcttcaaattccgactggatatttcaaaacaatacattacatttgcaacgaacataaaatctgaattatgagacctaaacatttctatttattcatgttatgctgcatccttacgctactaagtggctgtaaagatgatgacgacaatccactgcgtttttacaacagtgaatacgaagtacctatgggtggcagacgttacctcggcctggaaagcggaaatggtgactactcacttgcagtgaaagacacacgcatcgcaagtgccggaactgaaactggctggagtggagtacctgccggacgtatgatttatgtaaccggtatcctcaccggaacgacttatctgacagtaacagacaacgccacacaagaaacctgcactttaccaatcaaggtggtcgataattacgaaaatatggagttgctacgcagctacttgtctaacttacccaacggagatgcgaatcttctacccggtatttccgacatttttctgattaacaaccacgcacgggatgcttattttttcaaacaaggagaacagaccgccttttcatccggacttgaattaataacccaaggaagttacaaactggaaaaagaagaaggagacgataagaaaatgacactaaccctcactttttcggaagatatggcaacacctgtttccgatcataaattcataatatggggaaactcgtacttatttcatcggttggataaaagcctaaatctgaactggaacactccgcccattggagaaacgcggacatcacctgcacctcctccttcctacacgctggaagaaatagctgaaggcacagaaatcggaaaaggcagacagcttagctttagtctttcccaacaggaaatacctgcgggaatactgccttaatcagtaacgtattctgataagatgcgtatattttccggtaagtatccactacgaatgcgccattcttgcggataaagattattggcacgattgccgatgttcttcacaaatccgagaggaatatgccgataagtaagcaaaacatatccacgaggggctgttaccggtaaggtaatggcctcttttcgtaaatatgtgatggcctgttcataacttatttcttccgtagcgaatgcttcccggcataaaagtgaggtacacattgccaacgcatggttagggatcaaatcctttcctttcacttcgcctatttcaatccctgccgacacgattttcaggctttgtttcatcgtcgccaattcattagtatagtactgtgagaaagctcggatatttgttccttccgccaataaaatatacttgtccgaattttcatcattcaaccaacttttagccatattcagatattctttcgatacaggagaagatgctgctgttcctttcttatccttcttcttgaaagctttctctttggcggaagaagatactgggatctcttcttccgtctccggcttacgaaaagccaccagaaaaaagccttcacctttcgtcttatgagggaaaaaatgatagacgggaatagaagatttagaatgatcccctttatctgacaaaagatctcctgttatattccaattctcctgcacctgcacagttaatggttcgcccccatactcttgttgaatccaacgtgcattctcttcatcctcttttgtattaaatgtacacgtactatatataagaatacctccgggcttcaacgcatcccagatatctgcaataatccgtcgctggcgctgccaacagatttccacattctcggggctccactcttccacagctaccgggtctttacggaacataccttcaccggaacagggaacatctgtaagaatcacatcaaagaaagagagtaaagccgaaaaatctgccggatcattattggtcactaccacatccggatgtccccacttcgtcaggttttcagcaagaatctgcgaacgattccggattacctcattggctaccaacaggctcccttcgggaagtacactacgggcatgagtcgattttccaccgggagccgcacaaagatccaacatcttcaccggtcccgtgatatattgccggagtacctgctccacaaacatggaagaagcttcctgaacataataacagcctgcatggaataagggatcgaacgtgaaagtgagacgctcctccaaatagaatccttcggaagaccaaggtactttatccgataaagaatgattgattttcaattgattcaaccggatgctaaccggtggttcctgttggagggcaacagccagtttgtcgtattcttcatcgcccaatagagcgcgggtgtagtctataaaagaagcaggtaattccatctttcgtttattaatttccgcaaatatcaaaaatatttcgtctctttgcaactttctatgatattaactacgtctaacagataaagaaataaattaaaaaactattgatatgaaaaattttctattagcattgatggttgtactgaccacttgcacactggctgttgcccagaccaccgttgttcgtgattccatcgggaaagtaaaagtaactgtgaccaaagacaataaagcaaatacgaacaatactgctgtcacagtgattggtgtagacacagcagatgctgattctgcagacgtaaatgcaaactcaagtaatgttagcaccactcatggcaaagccagcttcacattcgattcggatgacagcgatttccccttccacaatgttagtgccggcggaggtattctggtagcaatcattgcaatcattgctgtattcggatttccggtattcattctatttgtaatcttcttcttccgttataaaaaccggaaagcacgttatcgccttgccgaacaggcacttgctgccggccaaccgcttccggcagagtttatccgcgaaaacaaaacagtcgattcgcgttcacaaggcatcaagaacacctttacgggtatcggtcttttcatcttcctctgggcaatcaccggcgaattcggaattggagctatcggcttactcgttacattcatgggtatcggacaatggattatcggtagcaaacaacagactcaagacacaaatgctacccggatgcatacgggtaataaggatgaaaaaaagaacccgaataacgttagaaccgatagtttcgaaatcatcccttccgaatccgaagagaaagacaaaggagtaaacgaagaaaagaacgacgagaataaatgagccaactcaatgatatatcattagtcgcacaggtcgtggtgttcaagaacaccagggcctttgaccagttggtgaaggagtatcagtcgcccatccgacgattcttcctgaacctgacttgcggcgacagcgaattgagtgacgaccttgcgcaagatacatttatcaaagcgtatacgaacattgcctctttccggaacttgtcaagtttctctacgtggctgtatcgtattgcttataatgttttttatgattatattcgcagccggaaagagacagccgacttggatacaagagaaatagacgccatcaacagcaccgaacaggagaatatcgggcaaaaaatggatgtctaccagtcgctcaaaatgcttaaagaagtggaaagaacctgcatcacgttgttctacatggaggacattagtatcgacaaaattgcagggattgtaggagtaccgtcagggacagtgaaaagccatctgtcacgcgggaaagaaaaattagcaacgtatttaaaacaaaacggttatgacagaaatagacaatgataagctcttgcgcgatttcttcgcagaaaacaagcaggaaatagcagataacggattcagtcgccgtgtcatgcaccacttacccgatcgtagtaatcgcctggctcgtatctggagcgctttcgtgatgactgtggcggccgcactttttgtatggttaggtggattggaagcaacttggggaaccataagagaagtatttatcggtatgattaatcatggcacttcaagccttgatccgaagtcaattattatcgcagctgttgtactattattcatggctacacgaaaggttgcttcgatggcataattaactcctagaaagaagttatttcgttaaagaatgataaatttgcccttgttagcaaaggagcccaaacttagatatcgtatctttgttcttctgtaaactaaaagagtgagaagagttttgaaattacgtatatttattttatttctgttcctgcctatattgagtgttcaggcaggtatcatcgacagtctgatgatacatcccagggactcaatcggattaaccagcgattcccttgtgctacgctatttacaagaatcgggaatccctatatctgataataataaggtaaaactgctaaaaagcggacgggagaagtttatcgatttgtttgaagccatccgggaagctaaacaccacatccatctggaatatttcaacttccgaaatgactccatcgccaatgctttatttgctctgctggccgaaaaagtgaaagaaggggtcgaagtacgagctatgttcgatgcattcggaaactggtcgaacaacaaaccacttaaaaagaaacatctcaagaaaatacgtgaacaaggaatcgagattgtcaagttcgatccattcacttttccttatatcaatcacgccgcccatcgcgatcaccggaaaatagctgtcatcgatggaaaagtggcttataccggtggtatgaatatcgccgattactacattaacggactacccaaaatcggaacctggcgtgatatgcacacacgcattgaaggggatgccgtcaatgatctgcaggagatattcctaacgatctggaataaggaaaccaagcagaatgtaggtggagccgcttatttcccccaacatgaggaacaaacggacagtacgaatattgtggtagcaatcgtagaccgtaccccgaaaaagaatagccgtatgttaagccacgcttatgccatgagcatctattcggcccaaaagaatgttcatatcgtcaatccttattttgtaccgacttcttctatcaaaaaggcgttgaatcggacaatcgaccgaggcgtaaatgttacaatcatggtttcttctgcctccgatatcccgtttactccggatgccgcactttataagttgcacaaactgatgaaaagaggagctactgtctatatgtataacggtggatttcaccactctaaaataatgatggtggatgatttgttctgtacagttggcactgccaacctgaacagccgcagcttgcgctatgattacgaaacaaatgcctttatctttgatacccaaataacgggtgaattaaatacaatgttccggaacgatatcgagcattgcacgcaactaacgcctgaattctggaaaaagcgctccccgtggaagaagttcgtcggctggtttgctaatttattcactccatttttgtaattttgtgcggagaatcattttcaccacaacttattcattatgaaacaatacctggatttactcaatcgtgtactaaccgaaggtacagaaaaaagtgaccgtaccggaaccggaaccatcagcgttttcggtcaccaaatgcgttttaatcttgatgacggtttcccgtgcctgacaaccaagaaactacatctgaaatcaatcatatacgaattactttggtttctgcaaggtgatactaatgtgaaatatcttcaggaacatggagtgcgcatctggaacgaatgggcggatgagaacggcgacttaggacatgtttatggttatcaatggcgttcatggcctgactataacggtggatttatcgaccagatcagtgaagtggtggaaacaatcaaacataatccggattcacgccgtatcattgtaagcgcctggaacgtagcagatttgaataatatgaatttgcctccctgccatgctttctttcagttttatgtagcagacggacggttgagcctgcaactgtatcaacgcagtgcagatatttttctgggtgttccttttaatattgcatcatacgcattattgctgcaaatgatggcacaagtgacgggactgaaagccggagattttgttcataccttcggtgatgcgcatatctacctgaaccacttggaacaagtgaagctccaattatcacgtgaacctcgtccattgccacaaatgaagatcaatccggatgtgaaaagtatcttcgacttcaaatttgaggactttgaattagtgaactatgacccgcatccgcatattgcgggagcagtagccgtgtaactttatcctcaaatccgcaactaagcccttgaacgtccttattgcgtttacacgtcctctcattactgaatttgcagataatttgaacttgaagcacccacttctgcctacaatatccccttaccccacaatgtgacttgaggcaatacacaatatcattcccataagttgtaggcattatccaaaatcagtctggaaaacatctgcgtaagcattattacaggtatagatgttcagcacataccgccttgatgtcctgatccacttggctggtacagagataaacctgaagacaaacgcttttatgcgacttgttgcattgagcccgaacttctttacgtcaagtctttgaataatggccttgtaaaagttacggataagtgctgtaagaagaaggaacactgtgttctctgccatgaaggatttgggcaatctgtcccacccgaaaccattgttcatatcatcgaagatacgttcctttcctccacgaaggttatagaactcgacaatttctcttacggaagaatcatagtcgttagtcaggatacaacggtatgtgtattctccttcccaaaaatcctgcacaccatccatccgtttctgtctttgaatcacaagtcgatatgccttacctttccacttctcaacaaggatagagttcaattcaaactcaatgccattgatttcctcagttttccagcctttgagagcaaaggtgtcattgtagatcgaactgcagcggttagcacggatatagaaggacttgcagtgtttttctatttcctccacgatttcctcggaacatgatccacaatcagctctgaagcgattgatagtgagcccattctgttcaaatctcgcaaagaacctcttcagcgtgtccttctgatggaaacgaacatttgtgttaccatcgctattctctataccgactatcaaatcgccaataaccgccacgccagggcgataaccaaggaacttcttgtatgtaggctttgcatcatacttctctgtctctatgaactgatggtcgaaatcaacatcatacatctcaccctctttcagttggccagatgcaaatatacaattgagcaataaagtattgagagtgtcagccgtattgaaatcgtaggtcttgcccatatctgatgtgtatgaaatgttttcttgcgtcaactcctttatcgccctgaggatagtatcagagctacaagtgcgaagtgtcggatgaagcgagaggtggttcatcaaatgagtagtgacatcctcaatacatgaaccgctacagaagtagatactcatgagagaacggatgatttcgctgtactgataaccgaacgatctacaccttagaccgagggttgagtcgattacagatgataatgtggagtcaaattgctccatgattgaaaataatcccccaaaaggagtgagtctctcagatttaatttgtatcttcgccatgtctatcgtcggattctcttgttttttttgcaacactaagataagtgaaaattctgacatggcaaaatcctgagcaactttttgttgctcaggtacttaaaaagtttaatttataatagtgttgcggaattaaggtttatgagtaaaatatctatcattgctgccgtagaccgccgtatggctatcggcttcgagaacaaacttcttttctggttacccaatgatttgaaacgtttcaaagcattaactaccggaaacaccatactgatgggacgcaaaactttcgagtcactaccgaaaggcgcattacccaatcgcagaaacatcgttttatcttccaacccggctacagaatgtcccggtgcggaagttttcccttcactcgaagcagctttgcaaagttgtaaagaggaggaacacatttatattataggaggtgcaagtatttatcagcaggctctttcttttgctgacgaactttgcctgacagaaatagatgatatgactcccgaagccgacgcctattttccggaagtatcgccagagatgtggcaagaaaaaagcagagaagctcatcctgcggatgagaaacatctctgctcctatgcttttgttgattacgtgagaaaataacgattaatcttcatcttctatgtcgaccatgattggcatctgccgcttaatggcttcatggaaggagattaatgtctcggtacgcgccaaacccaatggttgtaacttatcgtgaataatactcaataagtgatggttattctttgcgtaaattttgataaacatatcgtattttccggtagtgaaatgacattccaccacttcggggatagcttctaaagcttttgttaccgaatcaaaggattcgggatctttcagatatataccaatataagcgcaagtctcatatccgattttctcggggtcgatgacatattccgaaccttttaatatacctaaattagtaagcttctgaatacgctgatggattgcagcgccggaaacattacatgctcgtgctacttccaaaaaaggaatacgcgcattccctgcaatcagtttcagaatttgctcatctaaagcatctaattgatgatgtcccatttttgaatcaaattgtttttatcaatgaatcttttatgcaaagttagcgatttttcgacaacaaatactataatctattacttttatttgcagaaagcggataagtcaacaatagttcgtacctttgcgaaaaacataaatataccattaatatgaaacatatttgctgtattattctgtgtttctgtacttctataggaagttatgcacagaattttgctgattattttcagaacaaaacattgcgagtggattatatctttaccggggatgctacacaacaggctatttatctggatgagctatcacaacttcctacctgggcaggacgtcaacatcatctttcggaacttccattggaaggcaacggacaaattatagtgaaagaccttgccagcaaacagtgtatctacaaaacgtcattctcttctttgtttcaagagtggctgtccacagacgaagctaaagaaacagccaaaggatttgagaatactttccttcttccttatcctaaacagcctgtggaggtagaagtcactttatattctccgcgaaaaaaaagattggctacctataaacatatcgtgcgtccggatgatatattgattcataaacggggggtatcacatgtcactccgcatcggtatatgcttcaaagtggtaacgaaaaagactgcatagatgttgccatccttgcagaaggatacacagaaaaagaaatggatattttctaccaggatgcccaacgtacctgcgaaagtttgttttcgtatgagccgttccgctccatgaagggtaaatttaatattgttgccgtagccagtccttctacggacagtggtgtcagtattccccgcgaaaatcagtggaaacaaacggcggttcactcccatttcgatactttttactcagatcgttatctgactaccagccgggtaaagtctatccataatgcattggcaggcatcccctacgaacatatcattatcctggctaacacggatgtatatggtggtggaggaatatacaattcgtatacgctgaccacggcccatcacccgatgttcaagccggtagtcgtgcacgagttcggacacagtttcggtggactggccgacgaatatttctatgatgatgtgatgacagatacttatccgctggatgtcgaaccgtgggaacaaaatatttcaacacgggtgaacttcgcttccaaatggaaagatatgcttccgtcaggtaccccgatcccgacccccattgctgaaaaaaagaaatatcccgtaggagtatatgaaggaggtggctactctgccaaaggcatttatcgtccggcttatgactgtcgcatgaaaacaaacgaatatccggagttttgtccggtttgtcaacgtgccatccgtcgaatgattgaattttatgttccttaatggaatacaattatattattgtcaaacttaaaacccaaacctcatgattagacttcaaccaattagtacgtcggatctgcaacattacaaattcatggaagagcttctaattgattcgtttccaccggaagagtaccgtcagttggaacaactgcgcgagtacactgatcgtacgggcaactttcataataacatcatctttgatgatgacctgccagtcggcttcattacctattgggattttgacagtttctactatgtagaacactttgcaaccaatcctgccctgcgaaatggaggctatggaaaacgcacgctggaatacttatgcaattatttgaaacgcccgatcgtattggaagtagaacgtccgatagaggaaatggcaaaacgacgtatcagcttttatcaacgtcaaggctttacgctgtgggaaaaagactatagccaacctccttacaagcccggagatgattttctgcccatgtatttaatggtacacggagaattggattgtgaaaaggattttgaaacaatcaaaaagagaatacataaagaagtatatggagtaaaagacaactaattaaattaggtagcagctcgaaattagtttcacaaatggaaaaccttactccagctacgtatatataaaaagggcgttcaatttgaattgaacgccctttttatatatattgaattaactaattacttctcaccacgtttcgtagccgaatagttaatcttcaaagcataagattttctaagagcattttttacatcagtaacaatacccatctttgtcttctgatctactttcagagacacagtcatcttagcagcatcgccttcattcatactcgcacgttcctgaaaaatgaagtcttgtacttcacccacttcagcataactgtcattcaactgaatacgactttcagtacccattttcgcgcgatattcttgtgtaggttcccctacataaatgaatgttaccagtgatttcttctccagtttttcgagttcagtaccttgcggaagtgtaaactgcacctttaatgttacctcacgcatcgttgttacaatcataaagaagaacaacaaggtaaagataaggtcaggcaacgaagaagtattcaatgccggcatttcacgtttaccagtcttattaaattttcccattacttacttctttttttctccgtattttttaggttctgcttcagaaattcgttgcggataaacttcacgaacagctttctgctgtgcatcattcagttcagcgtaagtaaccccaaacttttcttgagctaactcatctctcaattcattgtatgcagctaccaattcgttctgcacacttatatatgcctgataagaagacccgcggtcattctgcaaagaaattacatgcttatcattaacaagagtagtaccaaagaaatcgacatttttttgtgtcttttccggcatattctcagcgttattgatgttagcaataaactctttggctttctgcctcaactgatcaacaccaatataatcattcccgcacatcaaagcatcatctttattcagataaacctgcaggatgttacgttctttaattttatcggtattctcattcttttcatcttcgggtggtggaggcaaaagtcttgccaaaccacggtccgtatccattgatgttgtaatcaagaagaagatcagcaacaagaaagcaatatccgccgtagaacttgagtttatatcaggaacttttctttttccttttgccattttaataacttatttaatcgagtatcctcaattgattacgacaattttttctttataccactcgcaatgattgcaacaactgtcacaaacaacaatatgtaaatagaataaaggaacatatcagttactttcagccaaaaaggaacattgtctgtaccactatagccaggaatctgcattggtgtaccatcacccattgcccaagctacaataagaacaacagctaaaagaaccaaaccaagtaaagacttgatggcatttgccgggttatccttcaaagctgcaccaaattggaatacagcagcaataacagtggctgcaatggctaagccaaacaaaacgtacatcagatagagtaaggcgtctgtttgagccggttgccacatttcgggatctactcccggaattaaggcatcgcccgaggcatctcctcctaagaagaacaagccaataacgatcagaataatagcaaacatcgcatacagtgcgtaatacgatattctatatgttaacttactcattttagattattttttgtatttcaagttatatttgattaccatatcaagcaaagagatagaagaatcttccatttcacttgtaagagcctcaattttagaaagtacgtagttgtagaatacctgaaggatcaatgctacaatcaaaccgaagatagttgtaatcaaggctactttcataccacctgcaacaaccgtcggagagatatcacctacctgctggattttatcaaatgcctgcaccataccgattacagtacccaagaatccgagtgacggagccattgcgataaacagtgtgatccaagaacatcctttttcaaggtaacctgcctgtacaccaccataagatacaactgacttctcaactacgtcaataccttgatcgattctcatcaaaccttggtagtagatagaagcaaccgggcctctggtgttacgagcaatgtctttagcagcttcaacatcacctttttccaaagcagcttcgatagatgccatgaatttttttgtgttgatttcagccaaactcaaataaatgatacgttcaatacagaaagccaaaccgatcactaaagcgatagctaccaaactcatgaaagatgcagtaccttcgatgaatttaactttgatttccttgtgaataccaccctcttctgcagcaggagcagcagctgtagtagcttcagcggcaggagcagcttgttgttcagtttgttctgctgcaggagcgtcttgagcctgagcaagttgaattgagccaaaagtgaaggccccaatcacagcaacaattgcaaataactttttcattgtgtgtctaatttttaagattaattaattgattattattattgtatttacttctcatctctctttcatttctgcggagagacggggattcgaaccccggatacgcttttggcgtatacacgctttccaggcgtgcctcttcaaccactcgagcatctctccctctgtgttttcagcattttcagctacaaatgtattcttttttttcttttcaagaagcattctcccccttttatcttgaataaatactgcaaattaatataatttaaaacctttcgaaccttatttgcggattccgaacacttttaacgcattcacagaagtgacctgtgccacatactccggatccctctgataaatatccgccaccttcatgagtgtgtctctcacattggcactttcattcctctttcccctgttcggcacgggagccaaatagggagaatcggtttcaagcacaatgcgctctaaaggaacagtcgtcaatgcctccggcaaagtcgatttcttgaaagttacaactccattgatacctaacataaatccttcaaattccaacaatttcgccgcttcttccgatgtcccggtaaaactatgaaaaatgccggttaatggggtatttttatagggttccattaccttatatatatattcaaacgcttctcttgaatggattacaatgggaagaccatattccagcgcccattctatttgcttttcaaaaaccaagatttgctctttcagaaaagtcttgtcccaataaagatcaagacctatttctccgatagccacaaactcacgggaagtcgacaagtatttgtgaacaatcgctaattcctgttcatacgattcattgacagaagtagggtgcagtccgatcatcggatagcaaaatcccggataatccctacaaaccgacaacatagcatcaatggtcgtactgtctatattgggcataaaaatataggaaactcccgctttctgcgcacgttccatcaccaatggcaggtcttcggtaaattcttcaacaaaaagatgagaatgagtatcgatcaacatgatatttctttttcttcttttattttttcgctggagcgataataatatatcagtccatagtcgcggcatttttctaatcgggtatcattgggagtgacatcctggtatttggcttctacctgattccagatatccaaaatcaattcatcggcacggtcacgcatagacgccagttcatcaagactacgattggttaatgcctgatagttcttctgccgttcatagctttccagaaaaatatcataatgcacttttacgcgtgcaatagtcggattataaataggtatgccaccttgagtggtccttaattgttcgccttcgattattttcttcccccactctaccagagaggcttcactcaacaggtccggtacggtattggaagcaggcaagccatataactctttatgtgccaccttgatttcatcacgaagcactgccaaattgagcacctgaataaaatgagagatatacagccgggcagtcttcacattcatctggtgtttacggctggcacgcgactgattatcgtagcactgggtataataaatttgcgctgcctcaaaccgatgcaaaaagttacgcgcttcaaataatgtcttcaatgtaatagccaagtcacgcacattatacatctctcccttttcgacagccgctttcagcgcccgaactcttgcttgatctgtatttggtagtcgtctataaggcatatctccgatacttaactacatttcacgatacattaataatttcaccagattcttcagttctttttttctgtcttccgcaacagctaccgccgctagactttccatagcgaacgtataatattcacgcattttgctttcacaaatattgcggatattcaactgattatagatttcagttaccgcttcgattttttcagaaggttgaaaagcctccgcattcaaccaacgattcaattcagcatgctgcttttcatccgcacggttcagtgctttgataagcatatatgtttttttattgcagaggatgtctccacctatcttcttcccgaacacttccggatcaccatatacatccaacaaatcatcctgtaactggaatgctactccaatatgcattccaaaattatatagattttctgcatcttcagcagtcgctcctgccagaattgcacctattttaagactacccgcaagcaacacggctgttttcaaacgaatcatttcaatgtattcgtcttctgtaacgtcacagcgagattcaaattccatatccagttgctgtccttcacagatttcgagtgtagtcaaactgaataaatccatcacttctttcaggtgttccggtggacaacccgtcatataccgaaatgccagaatcaacatagcatctcccgaaagtacagcagtattatcattccagaccttgtgcacggtaggtttccctctgcgcacatccgaacgatccatcaaatcatcatgcaacaaggtgtgattgtggtaaacttcaatcgcagtggcaggatcgtatatagacgcaacatcctcccgatacaagttatatcccatcaacattaatacaggacgtatccgcttcccacccagagaaaggatatattcaatcggttcataaagtcctttcggcgtccgggtaaactggatttcagaaatatgattatttatcttatcgagtaattgagaagctgtaaacatgatgaataaaaaaattaatgaataaaaagaggctgccgaaagcagcctctccatttatagtgttacaaattactgcaatctaaacatcacaggaactgtaaatttaacacgtaccggttttccgcgctgcatacctggtttccacttcggcatggtattaatcacacggagggcttctttatccagatacgggtcgacgctacgtacaaccttcgcatctacgatactaccgtctctgttaacaacgaactgtacgataacacgtccttgagttccgttttcctgtgcgatagtcggatatttaatattttttgccagatactgcatcaaagctgcttgtccgcccgggaagtccggcatattttctacaacctcgaaaatagtctgttcttccggttcttcttcaaccacttgtacaggcacatattttacttctacacgagcttgattatcttcattgataatagttgttgtttcctcaatatcagctttatcatccacaatctccagcaattctgctacctttggagcttcaggtggtggtggagctgcttgttcaggggtttcggtaataggaataatttcctcttcaaacacgacatcggctactgcctggcttgtatctatcttcacgtcacgctgggtccattcgaacgccacgaacatgaaagctagaactaccacgtaaccaacgagcaaccatgtagacttcttgccttccaggtctgccttgggtgatttttttacttccataaatttattaatataatgattaaaaaaagtgtcctttcatgtgtctccgggcaaatatagtacattttcatgtattcgttcccctctttgcctctttttatccggctttttaacttttttaattctttcgtacttgtcttgctccttttaacggcaaacttatggttgattttcaaatttaccgtatctttggcgaacaaatcagatgaactgaatatgaaaaagataacaattgcaatcgatggcttttcctcttgtggaaaaagtacaatggccaaagatcttgcccgcgaagtgggttacatttacattgacagtggagccatgtatcgtgcggtcactttatatagtatagagaacgggattttcaatggagacgtgatcgatacggagaaactgaaaaaagaaatcaagaacattcgtatatctttccagctgaataaagaaaccggacgtcccgacacgtatctgaacggcgtgaatgtggagaataaaatccgttcaatggaggtttcttccaaagtgagccctatcagtacgcttgacttcgtacgtgaagaaatggtggcgcagcaacaagcaatgggaaaggaaaagggcatcgtcatggatggccgggatataggaactaccgttttcccggatgcggaactgaaaatatttgtaaccgccactcccgaaatccgtgctcaacgccgttatgacgagctgaaagcaaaaggacaggaagccagcttcgacgaaattctggaaaacgtgaaacaacgggattatatcgaccagaaccgggaagtaagtccacttcgcaaagctgaagatgctctgcttctggataacacccacttatcgattgaagagcaaaaggaatggcttttcggacaatttaataaggtaagtaaataatttgctttatgatcaaggtagagatagacgaagattccggcttctgctttggtgtggtgacagccattcataaggcagaagaggagttggcaaagggagagactctctattgtctcggagatattgtacacaatagccgggaagtggaaaggcttaaaacgatgggattaatcacgatcaaccgggaagaattcaaacaactgaagaatgccaaagtattgcttcgcgcacacggagagccaccggaaacttacatgattgcccgtgaaaataatatagaaattatcgatgcgacctgtccggtagtattacgtttgcaaaaacgtatcagacaagggtatctggcagacagtgacaaagaaaaacaaattgtcatatacggcaaaagcggtcatgctgaagtgctgggattggtgggtcaaacagatggaaaagcaattgtcatcgaaaaggcagaagaagccaaaaagttggatttaaacaaaagcatccgtcttttctcacagactaccaagtcactggacgagtttcaggaaattgtggaatacttcaagcaacatatttcaccggaggcgactttcgaatattatgatactatctgtcgtcaggttgccaaccggatgcctaagcttcgggaatttgcggctacacacgatttgatatttttcgtcagcggcaaaaagagttcaaacggaaaaatgctgttcgaggagtgtttgaaggtgaacaccaattcacatttgatagataacgagaaagaaatagatccttctctccttcaaaacgtaaattcaattggcgtatgtggtgcgacttctactcctaaatggttgatggagaagatttacaatcacattcggacgctcatcaaagaataacagctttattctgacaaagaataatagcaaagcaacataaggaaacggcaaagtaacatgaacgaataaaaggaaagcgaaaaaaggtcatttgaacatttttaatgttttcttcttacgaaaaaaaacttcataaccactgctttcaactttttgttgtacatttgccgcgtcaaactaattaatgagagattgttatatgggaacagttaagtgtatcggaattttgacctccggaggtgatgctccgggaatgaacgctgctatacgtgcagtgacacgtgcagccatctacaatggattgcaagttaaaggtatatacagaggatataaaggtctggttacaggtgaaatcaaagaattcaagagtcagaatgtgagtaacatcatccagttgggtggtactatcctgaaaacggcacgttgtaaagagttcacgactccggaaggtcgtcagttggcttatgacaacatgaaaaaagaaggcatcgatgctttggttatcattggtggagacggctcactgacaggtgcgcgtatctttgcacaggaatttgatgttccatgtatcggactgccgggaactattgacaacgacctttatggtacagatacgaccatcggatatgatactgcattgaataccatattggatgccgtagataagattcgcgacacagccacttcacatgaacgtttgttcttcgttgaagttatgggacgtgatgccggtttccttgcgttgaacggagctatcgcttcgggtgcggaagctgccattattccggaattcagtacggaagtcgaccaactggaagagtttatcaaaaacggattccgcaaatcaaaaaacagtagcattgtattggtagccgaaagcgaactgacaggaggagccatgcattatgccgaacgtgtgaaaaacgaatatccgcaatatgatgtacgtgtgacgattttaggtcacctgcaacgtggtggtagcccaactgcccacgaccgtatcctggcaagccgcctcggtgctgctgctatcgatgctattatggaagatcaacgtaacgtaatgatcggaatcgaacatgatgaaatcgtttacgtaccgttcagcaaggctattaagaatgacaaaccaatcaagagagatcttgtcactgtattgaaagagctttcaatctaatctttttatttttaggagttcagcttatatcagtatataagataaagagcggtggatgaacgggagatttccttatcattcaccgctcttctttcatttattcaatgcttcttttcaccacagaggacacggaggacacagaggtgaatttgttttatgacttacggttgcgaccctaattttgatgcgtaatcctcctactataaagttgaaaaaacatgaaaacatctgccacctgcaaccaaacgcgtgtaatacactagttaatagatagttgtaacgttgcggatactgttgcagataggttgcagatcaaagtatctgccacacagtataagccttgcaaagccaattctccatgggtgcaaaagtttattgtatacattaacttcccgtttccaggcggggaactgtcgtttccggcattagaaattacagtttccacggcaggaaacgagagtttctaaggcgggacactacagtttctacgtaaggatactgtcgtttccccgtagagacaccacaatttctccatagggtcccccaattatcccatagctttgcacaaagggatcaaggctttttctttgattatataacgtgttgcagatactttatctgcaacctatctgccacaggtatctgcaacgttacaactatctattaactagtgtattacacgcttttcgttgcaggtggcagatgtttttatgtttttcaactttatagtaggaaaaaatttcattcatttccgtacctttatgagtctttttatccataaataatatccagtcagtggtagtgcagaccccaataaggcagcaataaaggtaagtatgcgagtaaacattcctccccagttaccaacatgcacagaataaatccaaccacgaatctttcccgacttgtcttgatgttgataaagacttgtttctgtaaattcaccattatccgtattgaaagaataacggtcagatgcccgctgattaccgaaacggttgaaagacacgcttgccgtaccagaagaaatactgatttgcttatactccggattctgacgtcttagtttatcataaatctcttgccaataaacgaatggtgaagttaccgagtacatatcactatgattgttttccggacgtctgcttctttcaccctttcgaacctcatttccttctcttttcttttcccgatgggctgccagtttggtatttctcttttgagcatcacttttctgttcatgtccttgggcggcacgttgctgtacttctaccccgaagaccttatagaaagccgtccgataccacggaaaagaccaggtcaaccccgtcagtgccatagccagtagaaagatcagagcatacattccacctgccacatgcaagtcataccaaaaccttctccaaccttttgttgctgttattttcaggctattcttcaatgctttacgtgtacgcggccaccaaatgacaattcccgaaatcagtacaaaaacaagtaaaagcgtactgacacctacaatcattttgccccaaaagattccttcatttcccggattcatactatccagaagccagcgatgcattcggaacataaacataaaaaagccgctacgctcgctttttccttttacttcgcccgtatactggtctacatacaaagatgcacgacgtggtttggaaagactaacctgatacgcacgtccgggatcagaagatatgctgacaccggtcaccgctacactgtcaggcaatgtcgtcgccactttttcaagcaacttatccataggaagaggagacccctttaccgtttctacgtagtaaaggtcgcgtcgaaaccactcattcgcctcattttcaaataccagcatggcaccggagaagcagacaagagttattatcagtccgaaagggacggaaagccacaaatgtatctttctgaatatttttttcatgttttcattactatttcttgaaaaagcctgcaaagctttccgctcggcaggcttttatctacaaaagattctctatttaaccgactgtattattttgaaagatattccatcttacctaccgtagtgatagcgtcagcctctaccgttaaacctttgactgccttgcctgtttttgcgtctattttatagaaggccggtttctcgcccgtagtcacagtgacagccatataagcataccctttttctccataaggctcgccaccaaactttccgtcagccggcagacctgtaacaggcataatcgtctgatcttccgccttgaaaacagctaattcgctaacatctgcacttgtaccaccattaatcatatcttccgctccatttttatacaattgaagcaggaagtaatcttcagagatgtgccagcaacggaaaataggatgtttagtgcctatctcttcaaagttcacatagtaatccggatcgaaatctgttgcgcctgctttgatacgcattgcacccgaaggcttctgtcctgttaccttcttcaaatctgaagatgaaactgccgtacgtccatatccgggagagaacacatagacgtcaccattatcagcggcccaaatagtctgataatattgtgaacgcatacgaccgcatgcatagcctattttatcagtcttggcaatcaccggagtctcattgaagttcgtgccactataaattgccacataagcattatccgggtattgtgtagaaggaatgacaccggctgtatatgcaccgctgccgctaccaccgtcagtcttagtcacaagttcctgatctgtcacagcttccggccattttttaataccgtacttactcattcccattaggatgacagatgtataaatcttattgttagcttcaaccagacctgcccatgaaactttttcaccattacccaagtaattttcggcaagcaaggtaccctcttcctgactgccatcggtcgcatccaaatagttgaacaacaatgcttgagccacattctgatcctcatctgttattttcgagtccccggtggaaacagtcaccactttatccctccaggttccataagacgtgatacgattataagtgtatgtgtacttttctttcattttaccatctgcccccagataataggaagctcctgtacctgcgccacctttattataaactaaagcaaacacataatccaatcctttatatacccaataggtaccgccaatcacttcggttccattcccttgggtcgacactgttccttcatccaaagaattggctactaccaaataacttgcttcaccggttgtggcagccaccacataagtcgtttctccatcaattggcgggttatccaccggatgattatcatcgtcgcaagatgccacaaacacaccgctactcaagcaaaaagctacggcaaaagcctgtaataaaaacttcctcatatattcttcattattgattgatactaaaaacttactcttattatttaccgaaaaatactctgaactttccatagaatgcgcgccccgctttttgcaggctaaaattgtcaaacagttgggcatcggtgaaattccgacattcaaatgatacattataacgtccattcttcatggtgtaggacaaagacagattatgagaaaactgttccggcaccatattctttgaatctttatctccgagattctcccagtaaagaggaaaatcgtgctgccagtagctatcatagccgatgctcaatacatttcctttgacaaacaggtcattccaataaaaatttgcattgatattagcataacgatagggcagattcggcatacgcactttatagtgcatgctttcttgcaaagaggaacccgccagaaacttttcgtaatcacgagtatcgatgctattaaatgttcctcctatatcaaaccaatgcgagaagctataaagcaatgacaaattataccctttggtccttacgtgaccgtggttctcataatatccgtagcttgttcctcccaatacgtccagtcctctttttatgtaatctttcgtatcccgatatatcaaaccggcctcggcatacaatccatgcttgccaaactgatgattatagctgaaactcaaattgacattatcacttttctccggtttcagattcattttaccagcttcaaggtcttcatctccaaagagttcgtccgtggtcggcaggcggaaagccttttcgtacgaaagtttcacctgaagatctttccatataaaataggtacctgccgctccatatccaagagcgcttgccgtattggacagattgatataattgcctattccatccgtattctgcgataccggtcccttgttgtattgccgataatatttggcaaatgccgacacattccatctgtccgacggcatcagacggtaagaaagcccgctgacgtttttacgggtgattttaggaatagaaaagtccgtgaatttggaagaagcaccaatggtagagcggctcgtacgttcaaaatcactgattacatgactgaaagtaaacgtatgtgcctgtccgatatgataattcatcttcagcgtcccattccagtttctatttttagattcactgttctggtaagactgttctccccggctgcctttttcataaaaatctccacgccagttgtaagcccgcgaagcggtatcgacattattggtgatattatgattataattggcagtcaacagcagatccaggtttttcaccagtaagttctttttgtaatattctaaagaagggaccaacgaatgtcctttgcggaatttttcaccgaacacgacatcttgataaacgcctgtttgtatctctttatagaaatgggaataattgaaactcaacgccaaacggtctgcccatttctttcctaccaagccgatttttccaatcacggcttcattatgatactggtcattaaaacgtttcagatgataaatcttatttttgtcaagtggcggaaaacgtacgcttccatcttctttaatctcaaattcgcgtacataagtgtccacataataatcattatccgagaaattttgaaaagcattgacctcatacatgaaaccatttttgaacgtttgtccgaagcgcacgtatgatttatgagtattaaatgacccgtaagaataggaagcgtccataaaccactttccgggttgcttgttggtgacaatattaaccactcccccaatagcatcggttccgaatcctacaggaaccactcctttatagacttctatacggtcggcaaaattaataggaacattgttcaaatcgaatgcggcaccggctccctcctgtggtatgccgtcaatgaagattttcacatgtttcccgctaaagccatcgatatacaattgcatatccgatcccactccacctgattcgcggagttttacaccaggcactttagtcagtgcacccgccaaagtctgcgtactgttatgcaatttcttcgcatcaatggctaccgcattaaaagcagactgattcacacgactgactccggatgtcgtgaccagcacctctcccagttcttttaccgccggcgcgatagtgacgtttacttttattctttctcccttggctaatttaactttcttttctaccgtttgataaccgatagccgaaacgacgagtgtatattcaccggctgtagttttcaaatgatatatacctttttcatctgtatagcatccttggttggttcctttcagataaactgtcgcaaaatccaccacttctttctccgtggacatcactctgcctgaaattaaactactacgatgacgcccatgttgtgaatatacggatacggaaaacaagaatgccagaaaaaccaaaaaatatggcacttatatacgacccgacactagtgggttaggtcataacaaatagttatagctcgtagaaatacgggcttttttattaactaaaaaattagaaagtatgaaatttgatattattgatataattcatgttttaggtcttgtttttttaaactttcttttttttattatgttctataatcctaataacaatagaggtaataaaaatacctgacataaaaaatatgtaatttatcactatcttcgatatgccaacattattatctactattttttctaatatatatatggaaaaagagtaaataactccacctgtgaataaatacattacagagctggtatcataacgacctaatattattgatactataagtaaaccaaatatagaaatgaaaagaatagacatatctaaagataatgcaaaaatagttctgtttatgaaatcttgttgggcaaagaaatcactatatatatacataaaagtatagcatagtggtaattgtataattaaacaaataagagcacttttttgcagctcatttaacatctcaaatatcttttcaaaattcataacagtttatttttgtgacaaatgtactgtttatagtttataagcagtacattgctctatatgttgtataaaaatgttctttagcatccttgcgaaaaacttccttgaaaatatattgcaaattacttgctaatatcgttgatttttagtatatttggatagctaaaaatttgacgttatgaaaaccgattttactcttttaactctatctgaaaactttcccgatgaagaaagttgcatcagatattttgagaagatgcgatggggagatgaagtcatttcgccttatgacagcaattctaaggtttataaatgtggtaatggtaagtataaatgcaagaatactggaagatactttgatgttaaaactggtactgcatttgccaatactaaactgcctatgaaagcatggttttatgctatgatgttattcttgtcacataagagaggtgtttcatcatgtcaattagcgagagatttaggtataactcaaaaaacagcgtggaagatgctccataagattagacaatatatggagatggagaatagccatactttatccggtgaggttgaaattgatgaagcgtttgtaggtgggaagaataaaaatagacataaggataagaaagtagagaaatgtcaaggacgtagttataaggataaagttcctgtattcggaatacttgaaagaggtggtaaggttgttgccaaagttgttcccaatacacaagctaaaactatagttccgattatcaaagaaaaagttgaattaggtagtgttgtttatactgatggttgggattacagtggactgcatgggaagtatgtacaaaggtcagtagaccatgaaaaacatttctatggtacgacctatgcaacagatgaaggcgagataattgttgttagtacgaacggtatcgaaaatgtgtggtcacatttcaagagaatgatatttgggatatactatcatgtaagcaaaaaatatatgcagaggtatattgacgaatatattttccgatttaatactcgaaattttaccgattctcaaagatttaatttacttttgcgtaatgcagcttagttatgggaaagaaaaagaaacaagaaatagacctaagtaacattaaaacagtgaggttagagattaacttttctgttcctaaagaacagttcgatgaactgctccgaaagatggcgcacattgcggaagggaaaacaccggatcaagtcgaagatgagaaagataaagacaaggaggaaaagaagaaggactaacagtttgttatttatgaagttattcttatatttgcagcgtatcatcgaatagatggtgcgctttttacgtattatagcctaatcgccatcgaactaccacattgacagcaataaggctattttggactcacttatgggtgtattgcgtttatacgccatatactggcgtagacttttgcctataagtgagtagggtgtggtagccctcgatggcgttaggcattagctctacgcctttttcatatatatgcgtgaggtgatgctaactaaatggaaacattattatttagtattaaccaataaaacgcaaaatgttatggaaaagcaatgtaaaaagtgcggcaaaaagttagataatgatttttctgattattgtctcgattgtttaaagtttagctactccaagttagttaaagaaaagcaagaacaaaaagaggattctgtattaaactcatgtaacaaagaagaagctactctaattgtaattgctaatattgtacttacgataggaataatagcttcaatcgttctcacgtttattatggcatacgataaatatggagatattcaatatactggattagcaatcacactgtctactttactatcaagtgttgtaacttgggctgtacttttatgtatagcaaaaatatccaaaaacattagggaaatcagaaataaattgctatcttagcagtcgaaaaagaaacatgctctttccagttaacaccaactagaaagagcttttttattataactaaaagttatggcacaaggctaggtgttgagtcgtatataagtgccaaaaatatttattgctcatctcctttttacctttttactttataaccttttcattgctctaaaagcgatgcaaaggtaagcagaaagagggatgtcaaacaatccctatctattggtaaaaataagacaacaaaaatgaggtatatagatatgtacaatacctatatataagtaaatactagataatttaaataaaaaaagaaaagaaaccctacttcagccaactcgccaacgcacgttccgttacctcccacaactgctctttctgtacatgattcgtgtatttatcagacaagtttttccggtggttattaacatacagttgccctgtcacaccggcttccttctcgtccaacagtaaaccgattgccgtagaagcccctttcttgggtttacggataaaaggacggaaaaaaatatccgtcaacggatcgaaccacttgtgcatagtgatgatatcagtagaaacaattcccggatcggcagcattgacgctaatccctttctctcgaagttgctcggaaagttcgaaagtaaacaataataaagccagcttcgtgttactgtaaacaggaatcctccaaaacgttcccgttttccctctatgaaagaaatccgggaagtcgagcttgccgattgcgtatgtacaggaaaccatatttacgatacgcgctccacgcaccatcagcggaattaatttccgggtaagcagataaggtcccatgtagttcacacttaccgttcgttcgaatccttcggaagtagtatgaaaacctgtctccatcgttccggcattattcattaacaaagagatgggaagattcctttctaagatctgactggcaaaagcaactacggattgcatggaagataagtcaatagccataacctccaaatccgggtttccggtttccttgctcaaacgttcacgaacaacctccgctttcttcggatgataacaagccattatgattcgataaccggctttggctacggcacgtgttatttctgttcccattcctccgtccgcaccggtgatgattgcccatttcatttcactcattttttctccagtttatcaatctccttttgtaaagaggaaggtaattgttctttcaaatgttgatgacaagccatttctatcgtatacatacgtcctatgcaataattactgtgtccacagttgcaacgtgcttgttcctcctgtttcatccggttcacgaatcccggttcgttgagtaacgctctcgccatctgcacggcatcaaaaccggaatcgagcacttcatctattttctgacgggaaacaagaccaccgacataaatcaacggcgcatccggaagagccgcacggaatttcaatgcatcttcaaggaaataggcctctttgaagggcacagagggtatcatccatttgccaaacatacggactccgtatttcagccaccaacaattcatatagtaagacatcgaacgaatcggcatggcacctctcattacatacatcggcgctttgctgacaaaaccaccactcaacaccaatccatgagcaccaagttccaacagacgtttggccacttgtatggattcgtctatctccattcctcctttgaagccgtcgcgcatattcatttttacgaaaactgccatatcactgcctgccgctttcatcacttcttccatcaccatatccataaaacgcatccggttttcgagcgaaccgccatattcatctttccgatgattggtgtagggagacaggaattgactaatcaaatagccgtgccccgcatgtacttcaacggcgtcaaatccggctttcctcgccagattgactgcatttccatacgctttcgccatttccggcagctcctctttttccattccacgcacaaacgtaggagaatagaggttgaagcctgaagatgcggatataggagtgacaccacatatatttttatgggacatatttccacaatgcccgatttgtatacctactgcggcaccttcatcgtgcacggcttttgtcagttcgtgtaaacggggaataatggacggacgcaaccacaactgacggtcgaaagaaagtccgctttgtgtcacggcagcataagccactgttgtcatacccactccccccgcagctaccgaccgatggtaatccagcaacatctgcgtgggagtattctccggacacatgctctcaaaagctgccgaacggatcgttcgattccgcagcgtcaaagggccaaaggtgaccgggctaaaaagtttagattccatagtagttgatattttatttaagtcatacgtaagtcatgataaaaaacgcccctaataaaggaaagggaacactcgtttccgttctcccactgcgtctccgaattcttcgcggtaacggcaccaaatggcgttggcacggggaacaaggttagcaatcgtccaccaaaggaagaccagaccggaaagtgaacaagtgagtatcgcccaacctgcccattctactatctcgccgaaatagttggcggaagtgacataacggtacattcctttttgaggcagataatgccgggtgtctcccggtttgcgcaaatgacgaatgatataatccgactgccagttcaacagcatacctgcgaaaaagagcagtgcgccgataataaaccacggtgaagtgaaccaaccggcttgatacatcgtttcgggagcaagatagaaaatccattttccttgcatataaccattcagcagattaaaaagaactcccatcgacatgattgccagcggcatcttactttttcctttcaatagcaaagggaagatgaaagcacgctgaaaatagtgaatctgaaagaagaggaagaaagtgaaaatcaccggttcaaaccgacgttcggaatagatccacatcacgcacatcaccacaaaaaccggagcttccatcaatatccaggctagtttattggagatagctactccccacgatgctgtgcggaaaataccatatccggctttcacaaagtaaagggcgataaaaacaaacaaagcaatcaggctcatcacccccagaaacagattaaaagtatctatactcataccgatctattttgtaacacgcaaaaataacaaaaatgagataaacgacgatacaaaaaatagaaagaatctgaagtacattcttttacgaacataaaaaaggagaaaatataaaatttcccggatgcgcgtctgaaatgatcgggcacacatccgggattacttatctatttaataaaaggatttgttcttatcagcgtttcttaattgggatataagccaaatcatcaagtacatttttataagccgggcggataatccgtttaccgtcgaaggttaattcttcattgcggtgtgcacaccagcctacgatacgtgccatggcaaacagtggagtgaagatttcctgcggcaaaccgatcatttcatacacgaagcccgaatagaaatcgatattgctggacactgtctttccgttgtttttaacccgtccgaaagtagcgatggcacgttcttccaacagttcgaggaaagcaaattcgctttctctgcctttttcacgggcaaggtcgcgagccagttctttcaatagaagagcacgagggtcggagatggtataaacggcatgtccgataccatagatcagtccggttttgttatacacttctttgttcaacattcgggtgtagtaagtatctatctcatctacacttgtccagtctttgatattttccttcaggtgctggaacatgtcggcaacctgaatattggcacctccgtgaagcggacctttcagcgaaccgataccagcggcgatggccgaataagtatctgttccggtagaagaagtaacgcgaacggtgaaagtagagttattaccaccaccgtgctctgcctgaagaatcagcaataggtcgagggtgcgtgcatccagttcggtatagtcttttttcagcatatacaggaaattctcggcaatagagagcttttcctgcggatggcggatatgcagagaacgtccgaaagtagcatgacgaagcatattataagcataagcgatgatagtggggaactttgaaatcagttcaatactctgacgcatcaggttatcccgggaggtatcatccgcatttgcgtcaaaacgatacatttccaatacactgcgagaaagaatattcatgatgttgtttccttccaactcgatgatgttcattttcgttttctgttccaacggcatattgtcgttaatcaactcacggaaagaaagcaattcttctttatctggcagacgtccggaaagcaataggtaagccacttcttcgaagccaaagcgtttctctttgattatagcgtgagaaatatcttctacatcataaccgcgatagaacagttttcccggtatgggtttcaacccaccccccggaacacgttcatatcctactacattaccgattctggttaaacctaccaatacacctgtgccgtcttcattacgcaatccgcgcttcacatcaaacttggagaacaattctgtatcaatccgggtagcttccttcatttcctcggaaagcttgtaaatcaagtactcttttttcatctttcttcgttttttattcgttacttttgtttttcaattctttccacgatctcacgagtgaaagcggaagtagagagggaggttccattcggcataaaacgggctaaatcgtgtgtagcgcgagcgtccaggaagctttgttccaaggctttctctatcagagcagccgcttctttccagtcaaaatattcgagcatcattactgccgaaaggataatagaacaagggttcaccacatcttttcccgcaatattgggagctgatccatgagtcgcttcaaagatggcatgacctgtctggtagttgatatttgctcccggagcgatgccgataccgcctaccatggccgccagttggtcggaaacatagtctccgttgaggtttaaggtggctattatggaatattcttcgggaatcaggagtgtattttgcaagaaagcatccgcaatgcaatcttttatcaccagtctgccatctgccaaggcatcgccaaattcacgttgcgccagttcgtagccccattttttgaaaccaccttcggtaaacttcataatattccctttatgcaccaacgttacggaaggcaaatgatggtcgagcgcatactggcaggcagcacgtacaagacgctccgtgccctcacgtgatacaggtttcacaccgaaagaagaggtttccgggaaacgaacttttgtcacgcccatttcatctttcaggaattgatagaacttttcagcttccggagttccggcttcccattcgatacctgcataaatatcttccgtattttcacggaacacacacatgttcactttctccggtgatttgacaggcgactgtactccctgataccaacgaaccggacgaagacagacgtataaatcaagtgtctgacgcagtgctacgttcaacgaacggattccacctccgacaggagttgtcaacggacctttgattcctaccaggtattcctgaaaggtttccattgtttcatccggcaaccaggaaccagtcgcgttgaaggcacgttctcccgccaacacttctttccattcgatccgacgtttgccgccgtatgctttctggatagctgcgtccactacggcttgcatggcaggagtcacttcggctcctactccatcgccggtaatataaggtacggtaggcacatcgggtaccaacagcgtaccatctgtttgcatggttattttgctcattttttatcttgtatttaaggcagaaccggcacggaaccaagctatctgctgttcattataggtatgttgcacttcaaaactttctttcgttccgtcttcgtgatgaagaataatcgtcagattgcgccccggtgcgaaatggactaagcctgatacggacaaaagatcgtgttcccgaatcttgtcatagtctactttatctacaaaagtaagagcaagcattccttgttttttcagatttgtttcgtggatacgggcaaaactcttagccaaaatgacacgtacattgaggaagcgtggttccatggctgcatgttcacggctggaaccttctccataattctcttcggcaacaacaatagacggaataccttcggatttatacatctttgccgtaccggaaactgttccataagtatttgtcgaacgattccaaacactattcgtttcaccattgaaagcattgacagctcccatcagcatattgtcggaaatattctccaaatgtccccggaagcggagccatggacctgccatagagatatggtcggtagtacattttccctgtgctttaatcaataaaggcatgttcagcaagtcctgtccgtcccatgccgggaaaggagtcagaagctggagacgttgggaatccggttttaccctgatttccgtttttgctccatggggggcaatatatccctcatttccctgttcaaaacctttcaaaggaagttcatctcctacaggttcggagagtttcactttttctccgttatgattcaccagtctgtctttcaacgggttgaaacagagatcaccggctattgttaacgccatcgttaattccggagaagctacaaacgcgtatgtgttgggattaccgtcagcgcgtttggcaaaattacgattgaaagaggtgacgattgagttttttcgtgtcggatcatccgtctcacgtttccactgaccgatacaaggtccacaagcatttgccataatcgtggctcccagccgttcaaaagcctcaatcataccgtctctttcggcagtagcccgaatttgctccgaacccggattgacgatcagtggagaagcgacgctcaaattcttttctgtcacctgctttgccaaagaagctgcacggctcaaatcctgataagaagaattggtacatgaacctatcaagcctacctccattttacgggggtagccgttcaataacactttttctgcaaattcagagatgggagtagcggcatccggtgtaaacggcccgtttatataaggttcgagttctgacaaatctatttcaatcacacggtcgtaatagttggatggttcgtcggtcacaatgtcgtctgcacgaaggtctgcaccaacagattcagcccaatcgactacacaatctcttccggtagctctcaaataagtagccatgcgtccgtcaaacgggaacaaagaggtagtagctccaacttcggcacccatattgcaaatggtagctttcccggtagcagaaagggattcggttccgggaccaaaatattcgataatagcattcgttcctccttttacggtaaggatgccggccaatttcaggattacatctttcggagaggtccaaccgcttagttttccggtcagacggacaccgataatcttcggcatttttagctcccattccattcctgtcatcacatccacggcatccgcgccaccaacaccgatagccaccatgcccagtccgcctgcattaggcgtatgagagtctgttcccaccatcataccgccagggaaagcatagttttcgagcactacctgatggataattcctgctcccggtttccagaagccgatgccataacgggaagatacatcacggaggaagtcgtatacttcttcattggttagtcttgccgtagcaatatccgcctttgcacctttatacgcctgtatcaagtgatcgcaatgtactgtcgaaggcacagccacctgatccttacctgcattcataaattgaagcaaagccatctgcgcagttgcatcctgcatagccacacgatcgggacggaaattcacataatcctccccccgtttgtaatctttcaaatcggctacatcatacagatgagcatacaaaatcttctcggccaacgtcaaagggcgtttcagcatagcccgtacgtgttctacctttcctttataagcagcgtagaaagcttctaacatagtcacatcatataccatattgctttttgtttttttagtctatctattaaaataacgaacggcgttcgagtaatgtttaacaaaatgaaatattttttctacccggaacgaagatttgttacctttgcgcctattatgagtaataatccgaaaagtcccattatagaccttcagcaacagcaactcctcctgcggatggagtatgaatatgagaaagaagaatttaagcggcagaccgaaacaatgggcgttgcccgtaaagtgaagcgcggtctctgctggtatcctgtctctcttggccgaagttactacaattcgctgaatcagcttgtaatagatattacacggaccgaaaataaagaaatagagcattcctttgagttcggccgtcctgtttgctttttccaccagtcattcgaaggaaaagtgaagtatatggatttcatcgctaccatcagctttgccgacgaagaacgaatggtcgttgtactccccggagcgggagctttagcggaactgcaaactgacggtatactgggagtacaactttattttgacgaaacatcgtaccgggccatgttcgaggcactggaagacacgatacgtgccaaggacaaccgcctggcggaactgcgcgacattttgttgggtacccaaaagccgggattccgcgaattatatcctgtccgcttcccatggctgaacagtacacaggaaacagcagtcaacaaggtgctatgtacacgtgacgtatctattgttcacggtcctccgggaaccgggaaaacaacgactcttgtcgaagcgatttacgaaacgttacaccgggaaccacaagtgcttgtctgtgcacaaagcaacacggctgtcgactggatttgtgagaaactggtagaccggggagtacccgtgctccgcattggaaatccgacccgagtcaacgacaaaatgctttcatccacctacgaacgccggtttgaaagtcatcctgcctatccggagctttggggaatccgtaaatctatccgcgaaatgggtagccggatgcgccggggtagttattctgaacgggaaggaatgcgtaatcgcatgagtcgtctccgcgaccgtgccacggagttggaaatacaaatcaatgccgatcttttcgacagtgcccgtgtgattgcttctaccctagtcagcagcaaccaccgcctgctcaacggacgtcgtttttcgactttattcatcgacgaagctgcacaagccctcgaagctgcctgctggatcgctatccgcaaagcagaccgggtcatccttgcaggagatcattgtcagcttccgccgactatcaaatgtatagaagcttcccgtggaggattggatcatacattaatggaaaaagtcgttcaacaaaaaccttccgcggtctctctattaaaagtacagtacagaatgcatgaaaccatcatgcagtttccctccgactggttttatcacggagaactggaagctgctccggaagtacgctatcgggggattcttgatttcgacactcccatgaactggatcgatacttcagagatggactttcacgaagattttgtaggagaaagcttcggacgcatcaataagcaggaagccaacctactactgcaagaactggaaacttacatcgaacgtatcggcaaagagcgaatactggatgaaagaattgatttcggtctgatttcgccatacaaggcacaagtgcaatatttgagaggaaaaataaaaggaagcagctttttacgccctttccgcagcctcatcaccgtgaatacggtagacggctttcagggacaggagcgagacgttattttcatcagtctcgtacgtgccaacgaggacggacaaatcgggtttctaaatgacttgcgaagaatgaatgtagcgattacgcgggcacgaatgaaacttgttatattaggagatacctccacccttgccaagcatcctttctataaaaggttgatgttattcattaaaaaggaggattaaatacttaatcctccttttaacaaagcacactttctcccgaaaccacactttttttaacacaaacaaaacaaacaatattttacatcagtactattcttaatttttcaccctcaaagatagtcgattattccaatgcactccaactatttccaccattttatttgcggatcgcgcgtttttgcccattctgcaaatttaggatatgttttatcaatgcgctgattctcctttttaagatctaaattcaaaatagaagcgtccaaacgagcatctacatgaattgcaaacggaaaaccatctttgcaaatgaaataggtaccatctacatcaccacgagaaatatcagctccggaagggaaacgattattcgcaccagtcgtcggcttatgatctgtcagatggacttctgtggcagagttgaatacttttataaaagggttataaggagctaccaccactgatttatcaagagtagggttattaaattgtatggataccgtatatgtcttctcttgaatattctgattaatcatatcctccgcattcacattggatactcccaattcagctttagcatccttgaataatgttatcacattacctgaataggaagtaatttcatcgccattgattattacttgggacgctttactcaaatcgaaaggaacctcatacgcaaacgagtttttataattagctcccgtccaagccaatgtgaacttatcaataatattaagaactttattatctatattataatcaacacttgactgatatttcatgactacatcattcaagtcataatctccttgttcaggccagttatcttcaaagccaagcactccagaatacttttctgttccttgtcgatcacccggattaggaacatccggaacttcaatagcagcaataggattagaagagataacgaaagcaacatcattatagtcattttcaccgtttttccagtcttccatagtgataacattcactctatcacctgctttattttttgctgcaaaaattgcagtgtgagaaattttgtcactattcaaagatttggttgagtagaacatattcccattagccttaacacctctccaaccgtcattccaaattaggaaaccaatctttgtacctgctgggatacgttccggttcttcttccggaaagctgcctgtctcatcaatatatttcaaattcaccgcaaccccactataattacccagactacttttatgtacattagggaagattacacatgcatgctttgcagcttgtcttattttatcaatactggcattttccgaataacaatagtaagcaaacacactttgcgcacctgtatctcctccgaaatagttgacaacgacattcgcatcttcttttatcagaatatcagcatcatcagagactaaattagttcctacattattctttccttccggaaaatatgtcgttatataactcttaagcgttgcatccacatttatttttttggaagcatccagatagttaggcctaccagtatttacattccaagttcctaatacattcggaattacatttgtaataaatttcaaagaagatcttgtttgtgcacttctcgttgatgaatccaaagcagttacatcaagagcattctcaaaggttatttttgcgctgacatccgaaccgacaactttagttttatacaaagtcggcacaccaaaatccggagaataaatataaacttctgaaactgctgtcgggaaagaagccggtttgatataacgtccttgtatatctgtaaatccggttgcaatgtgtgaaacccctgctttctttataatctgaccgccttctgccacataagaaagcggattttcagcataaacttcaaaataagccctaggacattcctttccataatcaatattcaattgaatattcttagtagtggcaaagtcgaaatagttatctaaagtaacttcttctttatctcctgaattagcaggatcatatacatctttctgtaaacagcttgagaaaacaacagaaacaacaccgataacacatgctaatttagcaatgttaatcattctttggggtaagttaaaacacatcatacttctcgttcattttatttgatggtgcaaatataaacataaacttgcatattttaatcacattattgatatatttttcaaaaaaaagtttctgcaagtttcacctacccattttaaatatcttattaataaaaaaaggagaaagcaaaaagccctctccttcttttaaaacttgtataatctagtctaattaattattctccggacgaagtttacgaacagttacagcagtctgccacatttcgctttcgcgtaattgacggagttcttcgttcaatttttcacgataatcaggttgtgaattactgtcgatagaaatctgcgcttcgttaccagtcttcacactgttatacaacttttcaactaccggtttgatagcatcgtggaatgggcccatccaatcgagagcaccacgttgagcagtagtagagcagttagcgtacatccagtccataccgttctttgcgaacaacggcatcaacgactgtgtcagttcttccactgtttcattgaatgcttcagaaggactatgaccgttttcacgcaatacttcgtactgtgccagcaacaaaccttggatagcacccatcaatgaaccacgttcacctgtcaagtcagaagtagcttcacgctggaaagttgtttcgaacagataaccggaaccgataccgatacccagtgcgatagttctttcgtaagccttgcctgtagcatcctgatagatagcataagaagagttcaagccacgtccttcgaggaacatagtacgcaaagacgtacccgaacctttaggagcaaccatgataacgtcgatatcagcaggaggcactacacctgtacggtcgttccaagtgatagcaaaaccgtgtgagaaataaagagcttttccggcagtcaggtaaggcttgatagtaggccatactgacattactgctgcgtcagacaacagacacattacaatagtacctttctcacaagcttcttcgataccgaacaaagtttcacccggaacccatccgtctgctactgccttatcgtatgtttttccttcacgttgaccaacgattacattgaaaccgttatcacgcaagttcagtgcctgtccaggaccctgtacgccataaccgattacagcgattgtttcattttccaatacttcacgagctttttccaatggaaattcgtcacggattactacagtttcagtagtacctccaaaattcaactgtgccattttctttttgtttttagtttttgatgacttacgccatctgttattaattgattttatattctcacatttattcaaatatcactttcgagcggcaaacaacttcgttaccattcttcttcacttctacgtgaaactcgtttgcgttcacttcatcgcagaagaaagagagttcatcaccaaaatagctttccgccacatacgccatttcaaaacgacggatacgcttggtcttatacaattcaatcgggaacaaatcaaggatatgctcgatgtaacggatgctgtttacatgaccgttgatatctatatcactgtattttgccgtcagggtagctattggctgatcgcttgtcactttgatgcgtgaaggcttttcaatcggacaaggctcatcacagacatagtctacgatacttcccccatgcaaagtcaacaagtcggcaggcttgcgggtattaagattaatcattgcccatacagaacgtgcgtagccaatcttcttcccatccttatcaataatagcaaaattacggtccgtaaacaagcggtagacattttccacccacgtctgaaccgagaaattctcatactgataaggcatttcatccaactcaatagccagacgtgaaagcacccatgtataattgtcctcattcagcgttgcaataccaaaaccacggtcattggcgtgaaaacctgcacaattcagcagatgatttcccagtacccccatagtcaaacgtccgttgaagtcaacatggaacggttctgccacaaactgataagtccctattctattttcttcattcattattcttattggtttttactttggttatacatagcttcccgtccatcgagaaactcattcacccgttcaaaacagctggtagtaatcgctacacgtcccgaacgaacaaactgcaaaacacaattcaaagccttcagttcaccatagagcgaagttatatcttcgctcattccatttttctcgacaatggaaaataccggattgacttccactatacgtgcattgtatctacggatcagcttggatgcttccggattctcctgaaaagcaggagtagacaccttatataatgcaatctcgtggaaataaatttcatcctctgtgaaataatgtgcctgaatcacgtcgatcttcttttcgatctgtttcactaccttctcaatgatgtccttatcagtccaggctgttattgtatacttatgtacacctttaatagaagaagcagatacattcagactctcaatatttatttgccgacgggtaaatacagcagttacctgattcagcaacccggctatattctccgaatgaacaatgattgtatataacgttttatcactcataactctaattttttaaatgcgaaccctcaactctccattctcaactctcaacttctcctagcactccagcaacatctggtttaccgaaccacctggaggagtcatcggcaaaacattgccttcttccaccacgcaagcttcgagcaggaacggaccgtccgttgccagcatttcagcaatagcttccttcagttcttcacgagtgaaagcacgtttggaaggaatatcataagccgaggccactttcatataatccggattcaacatcggggtaaacgaatagcgacggttgaaaaacatagcttgccactgacgtacgtttcctaggtaattattgttcaggcagataatcttcaccggagccttctgctccataatcgtacccagttcctgaatattcatttgcagtccgccatctcccataaatacgcatacggtgcgttccggtgctccgaaagttgccccgatagctgcgggaagcccgaagcccattgttccaagtcctccggaagtaatgatactgcgttctttcgtatatttaaagtagcgtgcagatatcatctgattttgacctacatctgttaccaaaacagcttcatggtgagtagcatcacttaccgcacgtaccacttcccccatactcaaagagtttgtggcaggatgaagttcgggacggattactttttcctcctctactttctcatattctttgaagctatcaatccattcggtatgagtgttctttttcagaagtttcgtcacagaagccagtgtttccttgcaatctcccaatacagctacatctacctttacattcttattaacttccgcaggatcgatatcaaaatgaatcacttttgcctgtttggcgtaagtagccaaattaccggtcacacggtcatcaaaacgcataccaacagcaatcagcacatcacatttattggtattgatattcggtcccagattgccgtgcatacccaacatacctttattcaacggatgttctgttggcaaagccgaaagcccgagcagcgtacaacccgcaggcatatccgctttttcgataaactcgcgcaattcgctctgtgcatttcccagttcaacaccttgtccaaccaatacaagcggacgttcagcgttattaatcagttcggcagcagcctgtacagactcctcgtccgtatcgggaacaggaacatagctacggataaaatcgactttcgtcggttcgtatttcgttttctctacttgcgcatttttggcaaagtccagtaccaccggccccggacgaccactacgagcaatgtaaaacgcacgtgctaccgcccaggctacatcttccgcacggcgaatctgataactccatttagtgattggctgggtaatacctaccaagtcaacttcctgaaaagcatcggtcccaagaaagcctgttcctacctgtccggcaatcaccacgataggcgtactatcgatcatcgcatccgcaatgcctgttaccgtattggttgctccgggaccgctcgtcaccaggcaaacacctacatcacccgatacacgggcataaccttgtgcggcatgggcggctccctgctcgtgacgaaccaagatatggttcaatatattttgatgatcgtacaaggcatcgaataccggcataatagaaccaccggggtaaccaaagatggtagtcactccctgatgttccaaggagcgcatcaaagcctctgcacctgttattaaatctttcatattagttgatagttgataaatgataaatgatagttgagaaatgacagttgaaaatgaatggtttacaatcattgcgctaagtgctgcgcagctaactattacctatcaactatattatataattctcactgctcccttatcggcagagcttaccatgctggcatacgccttcaggctcttcggtacataacggtcacgagtgacaggagtcatcggacgggccgccagttcttcatccgtcagtcgcacgttaatcttccggaccggaatatcgatttcgataatgtctccgtctacaatttttccgatattgcctccagctgccgcttcaggagaaatatgtccgatactcaatccggaagttccaccactgaaacgtccgtcggtaatcaaagcacattcttttccgagatgacgagatttgatataagaggtaggataaagcatttcctgcataccgggaccacccttcggaccttcgtgcgtaatgacgactacatcgccactgacgactcggcctccgaggatgccttcacaggctgcttcttgcgaatcaaatactttggcaggtccggtaaatttccagatactttcgtctacacctgctgtttttaccacacaaccgtcttgggcaatattgcctttcaatacggccaatccaccgtctttgctataagcatgttccaaatcacggatacatccgtttgcacggtctttatccagttccttatagtacatgccctgtgaaccaagtacgagattgaatctatttccggctgcactcgaatattttttaattgccttttcgcttacattcgggctggtgattgaatattcattaatagcttccgccaatgacattccgtctacccgtcgaacagatgtatctatcagaccgccttttgccagttcatccatgatagcaataataccaccggcacggtttacatcctgaatatgatatttctgtgtattgggagccaccttgcagagacaaggagccttgcgggaaagcatatcgatatcatccatcttgaaatctacctctgcttcatgagcaatagccaacaggtgaagaactgtattagtagaaccacccattgctatatccagcgtcatggcattcaagaaagcctgacgggtagcaatgctacaaggaagcacactttcgtctccttcttcataatataactttgcattttttacgatcagttctgctgcatctttgaaaagctgcgtacgattctcgtgtgtagctacgatggttccgtttccgggaagagccagtccgattgcttcattcaggcagttcattgaattggcggtaaacataccggaacaacatccgcaagtaggacaagcattttgctcgatattcgctacttcctgatcgctgacactttcatcagccgatttaatcatcgcgtcgatcaaatccaggtgctgaccattccattctccggcttccatcggaccgcccgatacaaatacggcaggaatattcaaacgcatagccgccatcaacattccgggagtaatcttatcgcaattgctgatacatatcattgcatctgccttgtgcgcattaaccatatattctacactgtctgcaatgatgtcacgtgaaggaagcgagtaaagcataccatcatgtcccattgctataccgtcgtcgatagctattgtattgaattccgcagcgaagcatcccagcttctcaatctctgccttcaccagctgaccgatttcatgcagatgcacatgtcccggaacaaactgggtgaacgaattgacgatagcaataatgggtttacccatctgattcttcttcatgccgttggctgcccataacgcacgggctcccgccatccgacggccttgtgtactaaacgaactgcgtaattgctttttcatttcaatctatcttttaattaaagagccttcctcacacaagtgagaaaggctctaaattctatcttttatggtacgaacacatacaacacaaaaacctttctcacgctcttgatgggaccaccacgacgcgaataatatgcaggactgctaggttaatagatgtatgtaacatattcatatcttcttttctttattttcgtgctgcaaaggtaagggcttttttattatatccaaacaaatcgaagaaaaaaatcacttaaaagcgaacaattgtaagaaaagagaggtattatttctctattttatcacttaaaggttgaatttacaactattatctaactgcgcgcctcactttctttttctgacaaaagcacttaataatctgaaatttaccctccctataccggagtacaagcaaataattcgtatctttgtagacccgtatttacgggaattattaatcagaaacaaaaaagatcagatggaaacagtagaaaacaagtacattaccgttgcatacaaactatatacaatggaagatggtgagaaagagttgttcgaagaagcaaaagcagaacatccctttcaattcatttcaggattaggaacaacactcgaagatttcgaaaatcagataactgctctttctaaaggtgataaatttgattttaccattccggcagataaggcttacggacaatatgacgaacaacacgttattgacctccccaaaaatatatttgaaatagatggcaaatttgacagcgaacgtattaaagaaggtaacatcgtacctttgatgactggtgacggtcaacgcgtaaatgccagcgtagtagaaatcaaaccggatattgtagtagttgacctcaaccatccgttggctggtgccgacctgatctttgaaggtgaaatactggaaagccgtcctgctacgaacgaagaaattcaggaacttgtgaaaatgatgagtggtggtgatggctgtggttgcggatgcgacagctgcggtgatggctgtggcgacgactgcggttgcgaaggcggacactgtcactaaataaagtattaaattataaagtattaagtattaattccgtgcggacacagccgggctttaatacttaatactttttttatgccgttatttgagctaatacttaatacctgatacttaatacttgaaatcagcatcctttatgcgtcatgatgtcaagcaccattttatccgtttcgttcatggcttgcgagccgatccttgtcaggttgcggatactttgatctacatcttcgtcgataattccctctacggaagtcacacaacggtcttccattgccatcattgcagataatacggctgtcgaaactccggtagttactttcaatgcacaactcggttttgcaccgtcacaaatcattcctgtcagattagcaatcatgttttgaacggcgaaggcaacctgattgtagtttccccccatcaaccaggtgattccacaactggatccggtagcagctaccacgcagccacacaaagctgacagacgtcctaaactttgtttgatatatataacagtgagatggcttaacattaaagcacggataagttcttcttcgctctttccgttctcttcggcaaagacaacgacagggagtgtagcggatatcccctgattaccactgccggaattactcatgacaggaatcattgcacccgccatccgggcgtcgcaagcagctgatgtataagagagaatatgagaaaatacgctgtcacccatcactttatgttcgtaagttccccgaagcattttacctaaagaatgtccgtaattacctttaaaggcttgctcggcagcagctttattcaaacgggctgtatcaagaatgaaacgaatctcatccaacggagcagtcagtgcaaagtcatagactttacgcaagtttaattcgagcgaagcatcttcctcttcctcgctgactgtatgttgcttgtcgagcaatgtctgttcatctttggctatatatataaaggtagtatgcccaccggcaatgatagctttagctgttttatctctcgctttacaaatcacttcgatataaagcttttccgtaatatcttctttcagagaaatacaaatccgtttttctgcaatgaaccgtttcccctgttccactgcttccggcgtacagtccctcaacacctccaactgatagtctgatttgccaatcaacgcacctaaagccacagctatgggaaggcctaccatacccgttcccgggattccgactcccatggcattctttagtatattagcacttagcaagacgtctatcttttccggtttcactcccaacgtttcagcagctttagctacacaaagcgctactgcgataggttccgtacatccaatagccggaatgacttctttcttaatcaactctataatttgccttctttctgattcagtcatggacttataagttttggttccacaaaaataggaaaatctttcttttccaacattctataatgaacaaataaaatctcatattgttataaaatctcccatacaccaaactttaacagaaagaattgatagaaaaatgaaagcaaaacacgtgattctctatttgctactggctattgtttccttttcctgtatcggcgaagaagctctcaatgcagaagcagacatattaagttgcgcactaccaggagtagccatgacaaccagtcctattattaacaataattccatcactatcttcgtcggtccgggaactgatatttcagaacttacacctgaatttacattgactccgggagctacaattaatcctcttagcggtacggaacgaaatttcaatactccacaagaatatactgttacagctgccgatggtgtttggaagaaaacgtatatcatatccgttatcgacacggaacttgccacgaactataatttcgaagatacgcttggcggaaagaagtactacatatttgtagaacgcgaaggaggtaaagtcgttatggaatgggccagcggaaatgcgggctatgccatgaccggcgtagccaaaactgctgatgactatcccactttccaaataacggacggaaaagccggcaaatgcctttctttagtgacacgcagtaccggattctttggacaaatagcaggaatgcctatcgcggcaggaaatctgtttatcggttcctttgatgtaagcaatgcaatgagtaatccgcttaaagcaactaaattcggtcttcctttccggcatgtacctacttatctggctggctattataagtacaaagcgggagatcagtttacagaaggaggcaaacctgtaaatgggaaacgggatatctgtgacatatatgccatcatgtacgaaaccagcgaatctgttccaacccttgacggaacgaacgcatttaccagcccaaacctgatttcaacagcacggattaataatgccaaagaaacgaacgaatggacttactttaagcttcctttcaccactctccccggcaaattcatagataaggaaaagctaatggatggaaaatataatatagccatagtgttcacctcaagtctggaaggagatcattttaacggagcaatcggaagtacgttgctcattgacgaggccgagttaatctatcactcggaagattagtggaactaaataactttataacaacaaaaacgatgaaaatctatccgtatatattcagtttactaacctgtataggaatagccctccccggctatgcacaggttgatcgaaatgaaacactgatccgttccgcccttcacggactggaatatgagataaaagcaggtttcagcattggcggcacagccccgcttcctcttccggtggaaatccgttccattgacggatataacccgacattagctatcagtataggaggtgaagtgaccaaatggattgccgttcagaacaagctcggaattatagtcggattgcgacttgaaaacaaagcaatgactaccgaagccaccgtgaagaattacaatatggagattctcgggcagggaggtgaaagaatcagcggagtatggacaggcggagtaaaaaccaaagtacatactgccggactgacaatacctctgatggctacctacaaactaaccaaccggtggaacatcaaagccgggccttatttctcctatctactttcaagagaattttcaggacacgtatatgaaggatatttgcgggaagatgatcctaccggtccgaaagtagagtttaccgacggcaaaattgcaacatacgatttctcggacgatttaagacatttccagtggggattacaggtaggagccggatggcgagccttcaagcacctcaatgtgtatgccgatcttacctggggattgaatgatatatttaaaaacaattttaatacagtcacttttgccatgtaccccatctacttgaatataggtttcgggtatgctttttaagtcccgctaggctctgccacctgcttcactccagagtaggttactttcaccgtctgttgcaatgcaggcactttcacattaatagtcatgtctgcatttccatcttctacagctcccgtaactgttacaggacaagtacccaaagaggcagcatctccttcaaatgtaagatcttgctgtccggtgaatgtagacacaccttccccctttttcacttcacatttatcaatgacaatatctccaaattttaatatctgctggttgatgaacaattcaaaatccttcagttcaatcttcacttccgtattgctgacctgcgagagcgtgataaacttctctattccgtcgccgatgacaatttcctggtcagagccatccggtatcatggatatatccagatttccccaatacgttccgattacatccggagccgttatcacagcttcctcttcaggaggattctcattattcttgttatcactgtcgtcgtcatcactgctacaagcagcaaagagagtaagagaacataccaatgccaataaatacaatagattctttttcatacgtctttggtttagttattacaataaattcgtcctttataaactaaaaagaagaaaaaaggttcaatatgcttcctttttcgaagttatttcgagttcgcaactttcttaccgaaaactttgttatatttgcgagacgaagttacgaaaagagtgtaatttattggaaatgagcgtaggttaattgctcttgatagtaataggttacgatttagttagttatctactgcattatccttctgcgcgttgcgtaaccttcaaagaactcttcgtatgcaaaagtagctatttaattcgagattttgatataaactcccgttttttatcccctcattcataagaattttccgtaaaagcggtattgtccgtcggcacaccattgcccaaaacgagtttggaacaaacgtgtgccgactaccgcatagctggagaaaagggcattgcctcacgcctaaacgatgtttagacagatgaagcaatgcccctttcttttgcgcctatgccaagaggtgcttttacgggttttcaaatgatttttcttttttcgctgtctcttttgccggaagcggaaagtgaatgcagagtgtgtcagcctgccccatgaatgaaacaggcgcccacacacagccggacaaaccaggaagaatgattgttgccacccggctgaacaagttccgtcggatcggaaacaatcatacttcctttgttgtggtttgcccttttcacgcttccggtgatgtctttttccttttggtgattcttttttttacggattttcccctgaagtttttttctacacaatctgcctctgttttcgtttacctccattttgcgcctttcagtaagccgcatcagtcagtcattttcgttctgggcgcaaaggtaattccgggattggacgggaaagcaaggtcaagcctcctgttttcggtaaaaatctccagccctgcgggtagtattttgaccgaaaaaccttgcattccctaatccctaccttttcaagcacccgaaacgaaaacgaccgatgcgacagaaagacgcataaaaaaaatgtcggataaacgagaggcagataagatagtttgaaactcaactccctcagctcttgaatccgcattaaaaacaaaaaaatcaaaaacagcgaagatatgacggcaacggcaaatttcagacaaatggcgcaacacatcgggttggcgatatgcggcttgatgatgcgcaccgccttcggggtgttcggcatcctttggggcatcatcagagagattgtaaacggagtgttccgagtggcgataggtgtaatcgtggctatcctttccaccattgccttctttggcttcatcctttggttattcaccctttaacccttaccgacatggcaaaaagaaacagcaagacggcagcgcagcagtgcagatattacgaggtggacaacatcttcgtgtatatggtggaaacgtacatcaacggcaattttgaaactttccgaagattgtaccacgaactgaacaaggacgcacggagggatttcatggacttccttctcagcgaggtagagccgacctattggagagagatactgaaacagataatctaaaaatgacagcgatatgaaaggaacagaccatttcaagagaacgatatatatgtacttggaacagcgtgcggaggaagatgcgctatttgcaaagaagtaccgcaaccctgccaagaacatggacgagtgcgtgacccacattctgaactatgtgcagaaaagcggttgcaacggtttcacggacggagagatattcgggcaagccatccactactatgaggaaaacgagatagaggtgggcaaaccgatggactgccaagtggttgtgaaccacgttgtgaaactcacggcagaggaaaaggcggaggcacgtcagaacgctgtccgcaaataccaagaggaggaactccgcaagttgcagaaccgccacagaccgtcagcgagaaaagaaaaccaaccccaaccctcattatttgatttaggcttatgaaaccgaagaccaagatacagaaagaggtggcaagactttccgccaaccttcgccccatatcagcgacacaaatagattgggcataccgccactgcgttgagcatatcggctaccgcaccaagaaagggaacatcacctgttccgactgcggtcacgagtggcacagcgacagcggactatgcgacacccttgaaggctgcacctgccccaaatgccatgccgaactcaaagtgcaggacacacgcagacgcatctacaaggaaacgcagaatttcagcgtgataaccacctgcaaagggtatcaggtaatccgcgtggcgcaggtcagatgcgagagcaggaaaggcgaaccgatgcgtttctactgccacgaggtcgtgcagcgttggatttcacccgacggcaaggttacggacatggcgttgctccgtggcttccttttctgctattgcgatgtgtgggcattaggcagcgatatggaggtaagaccgcacaacagcctatacgatgatgtggtggcaagaagctgtgcatatccaaagatgaggatattgccccaactcagacgtaacggcttcaagggcgatttccacggcatctcccccgtgcgtcttttcaaagccttgctttcagacccaagaattgaaacccttatgaaaggcggtgagattgaggtcatgaaacactttcttttcaatacccgtactgccgatgaatgttgggcatcatatctgattgccaagcgtcacaagtatcagatagacaacctctcaatgtggtgcgactatctgcgtatgctcaaaaaactcggtcaagacctccgtaacccgaagaacatctgtcccgaagatttcatggcggcacacgacaacgcaacccgaaaaattgaagccatacacgagaaggaaagagccgcagagcaacgccgttgggagattgaaaggcgtgagcgtgagcaacagcgacaactccaacgaaagaaagatgcggaggatttcatcgccaacaaatccaaattcttcggcttggtaatcacggacgaggaaataatcgtcaaggtgcttgaaagcatagacgagtattacaacgagggcaagacgcagggcatctgcgtgtttggcagtggatactacaagaaagccgacaccctcatactatcggcaaggattggcgatgagattattgaaaccgtagaggtggacttgcgaaccctcgaagtggtgcagtgccacggcaagcacaaccaggacaccgaatatcacgagcgcatcatagaccttgtgaacaagaacgccaaccttatccgtgagcggatgaaagcggcatagcataacccctaaaacaacattgatatggaagtaagaattgaaagtatgatttgtgtgtgggatgatgcaatccccacgatgttccttgaatttgtgaacctcctcactctcacaacgagtgagggggaattgagaaagagcgtaaaggagtttgccgagaagcacgaacttgacaagtttttcctttacggcttcggctcacaccatttctacctgcaccaacgctacacaagcaaccccgaaatggtgatgaagaacagagttctgtcagtacatttttaaccatctaaaaagcaacattatgacaacacgaatgaccatcaacggagtaagcacctgcgcggaagcaggtacggagaaatacgagcgtttccaatcgggtatcggaagacgcaggcggacacttgtgcagtacgactaccgccaccccatagacagagaattgttctcttgtgtcaaacccacgttggacgagtgccgagccgcacgggacaagtggctgaacgcaaagaagggaaaggaggacagactatgaacacgacctatcaaacgctgatagtcaagttcagcgaacctatcacggcattggacggtatctttgacgataccggagcgtggggaacggacaccctcaaggggtggatagatgattacgaaagcacacgtttcaccgccaccgacagccatacggcagtcatcacgagcgagtacaatatggaatgtgtgaaagagtggctacaacggcagacccccatttccgaaatgcgagaattttgaacgggatggcggtgtccgcaccgccaatacttaaaaccctaaaaacaaaagatatgatagccaagacgatattacagcagataggcggaaaacgcttcaccgccatgacaggtagccgtgatttcatagatatgggcaacggcttacggatgagccttgcaaggaacaaaacaagtgccaaccgccttgacatcatctatgacgaaggggcagacctctacaatatgcgcttctaccgcaggacgttcagcaaaaagacctttgagtgcaagacaaaggacattgccgtacacgagggtatctattttgatatgctggaggaaatgttcacgatggtgacgggactttacacacgcttttgagtggcggggcggcgagagccgccctactttctttcagtgagcatgatggcggacaaagaaagtagcaaagaaacctttgtccaatctgcgataactaaaaaatccgcaagtaaaacttgcggaggctatatattgggtcgttattttttggtggaggggaatgataatctcgaaccgttgaactacacatttctgcttcgtctccatttcccccaacgatttgatacgttcaatcatttttgttgttcctttctgaattttcctaaatactttcttcataatttcgctatactttttatggttaataactatgttttgtattgctctcacaacacttacaacttgaagtgttatttggaaaccgataggcaaaaatggctcaacgatgtcaattaacgagaaaatcctacgataatctatcaagtgatagagcaaaagacgtgccaagttaaatatggcacgtcttttgccagttttgtcagtccttttatgggatatacaacagcgcaaactccgcctttctccgtttgagcagcatggcgtggcgttttcctttgtagttgcagaaggctatatactcacggtagatgttcctgtcaccagcttccagcttcttgattaaggtgcttttggggattgttttgctgcctaacagcttcgccggtcccacattgtaagctaacgtgccaagcaaaatcgaatcaaccccgaatttacggaacatggcgacaaatttgcgcaggtctttccgcaaaagttcatccgcatcccgttttgtcatggttcgtgccgaatacttctcgtttggcaaaagtttgtgaccccaaccgacgtatgggtagtgtttttctgagtgccagccttcaaagtagcggcagcataaaaaagcacgttccataagcggcagtcggtagattgccgcctgcccgtccgttccctcttggcggctgatctgcgcggacacagaacagaccgtcagaagtgaacagagcattgtcatgaatacacgcatcatttcaacaaggggctgaagttgccgatgggaacgatggtaagatcgtcgtcctttacattcctgttgttgaagtcaaattccagttcgtaggagttgctaaagttatcctccaccaccacgatgaaattatgcgcctcatcacccgccgccgtgtagtacaggcggaatttttcgttctccagcaggtagcggtcgttaggcaggaaggtgatgccgttatccattttgagcgagccttccccctcgaactggaaatagcggatggtatagagcgtacccgaaaagtcgccctcctttttcagttcacagcggatttccactgtctgcccctttactaccttgttcggcacgggcatgacctccaccgtgaagggataggactgctggatgtccatgtcatcgtcacatgacacgagggtgaatgacatggcggctatcaggcataacgccactgccttgaatattgatgttctcttgtttctgttgttcagtatgttcattgttcttcgatttttagatggttgtttttctgttttttcgttgtcagttgcaggtactcgttcaagtccttgcaaccgtcatagagggaggaacggtcggtgacacgttccccgtatcgcatggtaagtgcggcaagcgtccgccgtccggcttcgtcacggtcgaggaagcagccgatgcgcccgtatccgtccagcaatcccgccgccttctccacgttggcgactgagttcagcacaagacagtcagcgttaccggttacaccaagcgtcacggcagagagaaagtccatgaagccctcgaacacgaggcactcgtcagccgggatgtcattcgcctttaccagtgatacagacttcggaggtatgcaacccttgaaatatcggcttctgacttcatagccacctgccatgttcggaaagccaacggcaaaataccgtttcccacgcacaccgtagttcaagcggcagcagtgacgggatgcgatggcgtaagggatgccccgttcctctaaatactccgtcagcagtgagcggagcagcggagcgacctccacatcctcaaaaacggattcggtcggcttcgagagatagacgggcttttcccatccggcaaccgtcatattggcggcttccgctatgaacttcgcttgcttcatgaagtcatcgctttgcagaaactccccggcaagcgtgaagatgtcgccgcccttgcccaaaccgaagtcgtaccagagctgtttcgccacgttcacacggaaagaggatgtgcgctcgcccctgtacggggcaagataccacagctcgttaccgctccttctgacaggctcatgccccagccgtgcgagaaaatccgcaagcggcatccttctgacagcatctatttccgtcctttccatgcccgtgtcagttgatgatgaacttgataccgaccccgaactgcgtgtggaacttccgtgtgtcgccaccccaaaggcaacgctcccgcaggttggcaagcagggcgatacggtctgccacgtaacactccacatcgagcgtcagcgcaccgccgtagatgaaggcgtcccggtcgtgcagcgtggagccgtcatgcagcaccttcttcccccaatttaccgcctcatatccggcgagagccgaagccccggcatagacgaaaacaatctttcgggcgtccgacagtatcttgaagtaatagccgccctccgccgtgaactgcgccacgggtatcttggtgtccttgtagggattgttcttcaacaggtattcgccaccgaacacccacttgttccccttcttcgtgtaggtggagagagccgccccgaagctgtacccgccgtccttgccgccgagattgaagccgtccgccatgtccgccctcacctcgatgccctgcatcttcggcagacaccgctgggcgtgcgcctgccctgtaaaaagggcaagcgacgcgatgattattgcgatgtactttctcatggtcagcgtacttgaagttcgttgatggtacccgcgcgtaccaaatcctcgttctcaatcacgaaggactggtgacggccgccgttcttctcgttcaattccaccacgaggcacttgtcatcggggatggtgaacttcgccatcgtgaagaccgtgcgctcgctctttttgcccggcacgagggtggcgtagttctgcgcgcggagcggcagaataatctgctcctgcacggcagtacgcttcgcaaccttcttgtccacgattttccaagtgatgtagtccacatcgaaaggcacgttgctctggttctttatctccgtgtggaaataaagcaagccgttgtgcgtgtagatgcctttcaacaggtattggatgccgaaacgcttgcagccgatatgcttcacctcgcgcttgttctgtttgtggatggacttcatgataaggcgcaccagcatcgggctttcgctgcccagctctttcagatagatttcctgcgcgttgttcgggcggttcaccgtgctgccgtcatggatgaagtcgcacatctccacgttgagcaacagcggttcggcggcgtacttcacgttgaaggtgtagaaactgccgtcctccgtgatgacggacatattcgtttcgttgggaaaattccttacggtagccttcacacggatgatgttctccgctccgtcggctttcccggcaatcaggtcgggcgagcctaaatcgacatagcgcacctccgccggaaaaatgacgtggacggtcttgtcgtaggtcacttccagaccgtgcggcggtatcatgcggtcgaaggtcagcttgcgtgacagcccgtgatataggtcgccgtccgcctccttctgcggatagacctccttcgtcaaggtcggttgttcacttccgttggtcgtttcaacggttacattctcctgcgcgttggcagttatgatgcccatagcgagggcaaacatgatgattacttttctcattacttttggattttagtggtaatttttattgttttcaatatttttcttggtaaagcatgaccctgtacccggctttcagatgcaccttgacggttcgcatctttttggcgatgtactggctcgtgccttgtatcagccccttgcccaagtcggaggcgagctgcgccccggcattggtggagatgttgatgctgcttcccagcgagccgcccatgttggcggcgacctcccggacggcgttcatctccatcgagttcgggatgaagatgccgggctgtccgtccgtgtcatagaccgcaagctccacggggataatcgtgccgtcgtattccagcgaggtaatctcgatgtcgagccgctcaccctgtatcttgcccgtgccgaccaccaccgcaccccggggtattgtcctgcctgccaccgccataggctccagcaggcgcagccttaccgtctgcccgtccgtcacgctctgcgccccatgcacgcacgccggtatggtgttcctgtccaatacctccgccgtgccgacagccgtgttgaaaccccggttgcgttcctgcgataaggcggcgacaaactccgcgttactcataggctgtgagagtgaagaaactacttgatgctccacctgtctgataggcattgccttgttcttcttccctttctgcacggtagttggctctgccctctgttccgccgatggctgtcctccgttctgaccgcccatgtactttgccgccagctcgtaggacttctccataagagccacctgctcgtccatagaggaagccttgcccctctcgctttccagttccgactccagcgatgcgatgcgctccaacaattcgtccatctccgcattgtcgtttttcggctggtcgtagaagtttccgagcgtggcgttcaggtcacggtaggcggctgcggaggactggatggtctgcggcgtggctggctttgccctttcttccttgccgcccggattggcgaggtcgaagtccactccgttctccgttcccgctatctcgcggtcgaacatgtcgcccagctgcccgatggcacggttgcggctctcctgacgctcttccatctccccatgctcgtaggctttcagcttgtcgccgataatctgccggttcgccttgtcagcgtcgggcatctcggtgttgtatccgtccgttcccggcggttgctccttgccggaggacggggcgaatatcagccacatcgccccgatgaacaccaacaccatagcgggcagcacgatcatcttctgccgtttcagccgttgcgcctctgtcagcggttcgcgctcctttttcggtttccccgtttcgggagcagctttgttctctttcgtcggttcattctttgtctgttccatataaataaggtgttaagtgattgcctgtttccgccggggtcggcagttccacccgtccggcgtgtcccgtttccatatgtgagccgtcgttcctgccgatgtcatagacggctctgccgaaggtgtaaagggcaagcaccgcgaaggcggcgaacatccccagcacgatgcggcggcgtgtttccggcggcaagccgtccagataccctttgagacttgccgccaagcgtttccgtttgtcgtggagtttccaatacatgccccacattgattttctgatacttttcatgtcctgttaccgtttgatagtctgtaaatccttgttctcaatgatggtgaaaccctcgatggtaaaaccgttcgggttgtcatccgaccgcgatgcgttcagcaggcggcaggtggtcacgaggctgcgctcggtgacgttgctctgccggatgattttctgtgtggcgtaggtcacggcacggtagggataggcgttgaagtcgcacaccacgctgtccaccttcagcacttggttgatgttcccggcgatgatgcggttgtagtaccccttctccgcgaagtccgaataatagtggtacacgctcttgtccgccagcagcaaggcacgtttcacgttgtgttcaatcgcgcttttttcaggtgatagcgtgaagaacatctcgtggaaacggcgcacatgttcccgtgcctccgccgggcggttctgcgacaaatcctgagacaaggcgagcatcaggctcttgccgttgtccagcacatagattttctcccgttgcttctctgcgaaacggtaggagttccacacgctccacaccgtcaccacggcgcacagcgagaggaagacgataccgaacaggcgtatctgcctgaacgacgattcgatgtttctaagtgatttgaattccatttatattttccaatttatgattgcacattgattatttcagcaatttgccgacacgtccgactgcgtttcctgcggctgcacccgccacgctgcccgccatgcttccggctcgtcccgccatctggttcacgttgcgaccgtaaccgcccatgcctccggcttggataatccagcccgcaacggtgggaatggtaaagtagccgatgatgccgatgcagaggaatacgatatacaccccgtcgctcgaatccagcgagaagttcgggtctgcctgcatccgctcgatgtcgttttgcagcatcagaacctgtatcttcgccagtatggtgctgaacatgtccgataccggtagccacagatagacctgtatatagcggcatatccactgcgtgagcgtgttttggaaaccgtcccataccgacagggcgaaggctatcggaccgagaatcgccagcaccacgagaaagaaggtgcggacggtgtctatcacgagggcggcggcttggaacagcagttcgagtatctcgcggaagaagtcgcggatgctcttcttcatgttgtacattccccggtcgatatacattcccgccatcgtcaccatgtcggagggcgaccagccgagttcctccagttgcttgtcaaattcctcgttggacacgaggtaggcggtttcggggttgcgtaccatcgcctcgtattccagtttgtccttctgctcccggtatcggttcatgtccagcgtttccgcctccagcatctttgccgtgccctgtacgacgggtgagaggatgctgtttatcgtgcccagcaccacagtcgggaagaacatgatgcacagaccgatggcaaaaggacggagcatcgggaatacgtctatcggttcagctctcgccagcgactgccatacccggtaggcgacgtagaacagcgcacccagcccggcgatgcctttcgccacaccagccatgtccccacacagcggcatcatctgctcataaagtgaacgtaaaatctgatgaaggttgtcgaacttcataggctaccagtatctttcgttcatgttcccgtacagccccatgatgcggtcgaggtcgttcttctttttcgcacgcaggtaactcacggagatgttcttgttcgtgtagtagctcacgaggttgcggtaacgcttcatcttcgagtggcagcgttccaccacgtccatgcgctccttgtcggtcatggagagcgtggtgatgttcaccacgttcctgagttccgtcaacacttcgttgctttcctccagcagtttcgtgtagccgaaagcgattgcggaaagctcttcgggtctgaaattcccgtcacggagcatccgttggaaactgttcacatagatgtctgtgatgtcgcccaccatcaggatggtctgctgcaccttgcgggcgtccttgaccagattgttcaccgatttgagggcatcgtaatacttcttgccctgctgatagattttcaccgtctcctgaaagttgctcaccatgttcgtggcggtcttggaggtatggatgatgtttttggaggcattgatgatgccctgcgctagattgcccggatcgcttacgacccactgtgcgcttgccctgcccgcgaaaagcaggcacaggcagataatcattgttattcttgttctcatgttactttggattttagtggttgttattcttcggtcggatgtcccggctgcggcttcacccgcacatagtccccgtttggcgagaaagtcagcacatccgtggcctcgttgtaggacacgtcgatgcggaagccggtgttcatgaacaggttgccgttctcctcctgcaagagataggtttccggcttgagcttgcggcgcagaccgctacgacggaacaccgtcactttgtaggcttcgccctccttgtagataagcacgtcaggttttccctccacgctctcccagttcccgcacagcatgtcgcggcggttgtcggccacgtcgcaggattgcagcatcatgaccgccaatccgataaggcacttgctgacttgcagcattttcacttttggtaaattcatacgcgtttttcttttttggttgatacattctgttttttagttattccttgtttctccgcctttcggcaagctgccggatggcggcttcgatgtcgtcgcccagcttctccgccagacggtaaacctccactttttccgtttcctcggtggtgtacgccagatactcttccgcgctgacctccgtggcatagaccgccgactgcgtgccgcccaagcctatccacacctccttgtagagccgtgaagggttgttcgccatgttgatggagagtatctgcgacttctccttttccgtcagtccgagcaacgcctgtatctggtcgaacttgttcatatatttcctttggtcaagcaggattttacaatccgagttgttgataatgctctctttgaccaccggagaactgataatgtcgtccacctcctgcgtcaccacgattgcctcgccgtaatattttctgaccgtcttatacatatagcgcagatattcagccatgttcgccgatgagagggccttccaagcctcttccacgataagctgtttccgcacgcctttcagccgccgcatcttgttgatgaaggcttccatgatgatgatggtcacgacggggaacagttcgcggttttctttaatcgaatctatctcgaagacgatgaaccgcttgccgagcaggtcgatgttctccgtggagttgagcaggaaatcgtaacgcccgccccggtaatactgccgcatggtggtgagcatgttgtcgatgttgaagtcggacttctccaccttgatgtcacgctgtgccagttccttgcggtagtcgtcacgcatatactcgtagaaggtgttgaacgacggcacgatgctacggtcggattggatgcgctcaatataggcactcacggcactgcccagctcgccgctctccgtctttgtcaccttgtcgtcctccgacttccagagcgtcagcaacagggtcttgatgctgtccttcttctccacgtcgaagatgtaatcgtcggtgtagaacgggttgaagctgatgggcttatcttccgtgtaggtgaaatacacaccgtccgctccgcctgtcttgcgtcggatcatgccgcacaagccctgataggagtttcccgtgtccaccaataccacatgtgcgccttgctcataatattggcgcacgaggtggttcatgaagaaagacttgccgctgcccgaaggacccagcacgaacttgttgcggttggtcgtgatacctcgcttcatgggcaggtcggagatgtcaaggtgcagcggttttcccgtgagcctgtccaccatcttgatgccgaagggcgagagcgagctgcggtagttggtttcctctgtgaacaggcacaccgcctgttcgatgaaggtgtggaaactctcttccgccgggaagtccgccgcattgccgggtatcgccgcccagtagagtgtcgggcagtcgatggtgttgtggcgcggcacgcattccatgcttgccaactggctgcccacgtcgttcttgatatgcttcagttcctccgcatcgtcgctccacgccatgacgttgaagtgtgcccgtaccgaggtcagtccgtaggaatgggcttcgttcaggtattggtctatccactcgcggttgatgctgttgctccttgaatagcgagatagcgactgcatgttacgggcggacttctcgaacttctgcaaggtttcctcactgttgtctatcagcacatactggttgtagatatggttgcaggagagcagaagccccaccggggaggcgaatgacagtcggcagtcactccggtcggtggagagcttctcgtaacgggtgtcggtagccaccttgcccggcaggtcttccgcgtcggagagggtgtgcagacacaggcggttgtcgccgatgcgcatctcccttgccgaaagctcgatgtcctgcaaggtggtgtcaccttccggcatgagcgagaagtagcgttcaataagtcccgtctttccctcagtacccacaatctcatcggtggagaggcggcgcagcctgacaagcccgctgtcgttcatgatgcgctcgaactgttcgcaggcttccaagaacttggtcgtggtttccctgtccagctccttcgggatgatatgtccccggcacagcgtgctgaaattgctctgcatccggttacgctcctttgttgtcttggtcaggtagaggtagcaggtgtgtttcaggtacggacgctcgttgaagtgacgctcgaaagagcggcttaaaaagctcatgtcgtccttctgaagctccggtttgtagcgttccttgatgaaccagtcctgtttgtggacgacggagtagtccggcagcaccttgatagccttgcaccagcaactgtgtatcgcctcgtactccgcacccgtcacggtgtaaagttccggtagttccacctcgaaagccaccgtgatgtcggcgtcctttgagatgatgcagccatgctccaccgctaaaagtgggaacctgttttccagtgttgtcattttcgatgtattcctcattgtctttcttcctttcgttgtcgtttgaacagacgggttatccgccgccggttgataaggtatcggggatggctccgtgccgctcctaatttcatcagcccgtgttcaccgtaccgggcgttcagcgcgaaggtctgccatacaaggagggaggacgatgccgcgccgaagccgatacatatccactggtcgataccgaccatgtagaggatgacgaacaggacgaagagagccagcagacctccgcagaagatgaagaggtactgtgccttcaagcccttgaactctaccggacggccgatacccttgttgattgggtattcagccatacattatttattaaaggaagaatgagcgcaggatggtggcggcaacaatcaggaagatgcacgcgccgaaccacgaggcggctgtcttgctggtgtcggggtcgcccgatgaaaacttgccgtacacttttacgcccccgataagcccgacgactgcaccgatggcgtatatcagtttagttccggggtcgaaataagaactcaccatagaggtggcttcgttgatgcccgcgatgccgtttccctgcgcgaaagcggaggcggttgcggcgatgacaagtgccgcggagaggattgcttttctgtttttcaagatgttcttgttcataaactgttcttgttttttgccgtcaaaagggtggatggtcctttgtcgggcggttgatactttgtttctttactttggttttagtggatgcccgtttgtttccacggacgtgggcgtgtccgttgcggatggggatgcgccttgcgtttcctcgccgcgtgggttgatgtcattctttcatgttcatttcttttattgttgtcatacatagttgcgaatgtcgaactcctcgatgttgtccggcacgacgaactccttttcagatttcttcagccgaatctcgataagccccttgatgcggatgcctatctccgaagagccttccatcattttctcgtacaactccgtgccctccatgtcggtgaacaccttagccgccttttcacgttccgcctgtgtcgcgtccgggtttttggcggtcttgcaggcgtcgtcaatctcgtcaaagctgctgcccgaagcccgtggcgtgtccgaggcgtcctcttccggttcgtcgtccccgtatcccagttcctccggcggtatgctcgtgaaggtctcatcgagtttttcctccgggacttgtgccgggcgggatgcgtttcccgtttttccgtcgtcaaaagtagcctcttcctccgacagctcaatgcctttttcaatagtggcggcttcttgcgtcggtatggcagcggttgtccgggtggatgccatcctgaaacggctcttgccgatgatgtccgccttttccgcagggacttcctcgtgtgccgctatgcgtttagcctcattcccgtccagtgaccgccataatccgacaatgcccttgaagaagcggacaatccgcgtgtccatgatgcgctcgtaaaggagcaggaacaggaaccagaggttgcagccgaccgataccgccagcagaatgtctgtcatgctgattgtgtaattcatatccttccgtttttggttagaatactgaattgtaatttcgggcataaaggctctttatcgcatcttcgcactggttgaagtggtgcgtcagcacatggtcgatgtaagcggacagcgtaagccggtcatgcccgattacacgggtgatacgcatgatacgctcgtggtactccgggcgcacatacgccatcttcccctcacgtgcctttacttccgggtcgcggatgaacaggcgttcatagtccttctcactgcatttgccgcttaccgggacaggcgacagtatttccacactcgcctgcacttgggtaaacatacctccgcagtcttgctgtggtcttttttcattcggtgtcatttctttttccattttcaaatcagatcttcacgttgtttcttgtacagttcgttgattctctccttgtgctgttccagatgctggcgcagcacggtatccacatatccgcctactgagatttcccctccggcgatgtcgttcacgattctgaggatcttgccgtggacgtcacggctgatatagacacattggcgggtctttatctcgttgcggcgcaggaatagctcgttgtagtcctcgtcctgccttttccggcgtccactttccctctgcgctttttcccgtgttacgggttgcacaggagatggttccggtgcggcggtgtcctcttcggtcggtgcagctgcgggtacttcctgtgcggggcgcagtgtcccgtcctgtgtgcgccgcccgatggaggctaacagcagttcctcgtcgatgccttccgtgttcactttcctgctgcccatgctcactgcggtctgatgatgtcgcttatctcttcggaaaactcccggatgccactccctttcagcagtgccgtgtccatcgggaagatggtggagcggaaaacgctcttgcgctcttccgaaaggtcacggcggaacttcttgctgtcgggcaagcgggtggaaagtaccggaaagcccatttcggctatcacttcctcgtagatgccgtacaagtcgttcctctccctgccgtccaccatcgtccagaacagatgcagcccctttgttttcgcctgtccggtagtcatcagcctgtcgcggaacatcgtgacgaatttcagggtactctccacgacaaagcggtcggcactcagcggagtgaaaatgtagtccatctgcgagagcgtctttatcacgccgttgcttcggagtgtgccgggcatgtcgaagaacaccacgtcgggtttcacgtcctcagtggcaatcatcctctcggcatcgtcgagggcgttcaccgcattgcttttgacgatggtgtaggcgttctttttgatccggcggaaatggtcgcaagcgagagccttgaagtaggtgctgctgtcgataagccccatttcgtgttcgcgcagcccgtggatgctgtgctgcgggtcgtcgcagtccacgacggcgacattgtagcctttcacgttgtgcaggtagctggcggcaagtgccgtgacagtggatttgccgatgccacctttctgtgttgcgaatgcaacgaagatttccttactcatagttccatttattttaattgttgatgatttgtttttctgtttccatacggatttggctgtcgcaccatccgcttccgtgactacacacgcaggcgggtcgtcgcgtatccggttctgtggtgaagcggtgcgtcggacaaatggtgattgacgacattgcgtcatgaagtcattgaatccatacgtcaccgaattgtcggagaaccgggtttccgacggttcgggtatccgtttcggcaagtatccgaagaagcggatttccgggtatttgaatgttccgtttatcatatcttcaaatcgttcgtttcttgaatcatgctgcaaataaacaagtatattttggaacctgtatcacttctccggcaagtggcggcacgttgcgccggttggcagtcattgaccgggtcaagcatctgtccgataccgctttaagggcgtaactttgcacccggacagcagggttcgccgatgacgcgcggcccggagtcctgaaaggtattttcccaatccgtcccctgacggatttttatgttcacctgaacatagcaagatgtcttttcagccgctcaaaatattttgagcagccacgaaaagcacttgcccttgcagggggcgggctttccctccgaagtcgggaagcctttcagaactgcggtgctgtaatccgaagcggcggcttatgccgtcaatccgctaaatccaaagtaatatgaaagagaaaaggaaaagcaaatcagggagaaatcccaaacttgatccggcggtgtaccggtacaccgtccgtttcaacgaggaggaacacaaccgtttcctcgccatgttcggaaaatcgggtgtctatgcacggtctgttttcctcaaagcgcacttcttcgggcaaccgttcaaggtgctgaaggtggacaagacgttggtggactattacaccaaactgtcggattttcatgcacaattccgtgccgtgggtacgaattacaaccaagtcgtgaaggaactgaggctgcatttttcagagaaaaaggcgatggcgttgctctacaaattagagcaacacaccgtcgaactcgtgaaactgagccgccggattgtggaactttcaagggaaatggaggcaaaatggtcgcaaaaatcagtgtaggaagttcgttgtacggcgcgattgcctacaacggggagaagattaacgaggcgcaggggcggcttctcaccaccaaccgcatctacaatgacggttcgggaacggtggacataggcaaggcgatggagggttttctcaccttcctgccaccgcagatgaagatcgagaagccggtggtgcatatctctctcaacccgcacccggaggatgtgctgaccgatattgagttgcagaatatcgcccgcgagtatctggaaaaactcggtttcggaaaccagccttatcttgtattcaagcacgaggacatcgaccgccaccacctgcacatcgtgacggtcaacgtggacgagaacgggaaaaggctcaaccgggattttctctaccgccgcagcgaccgtatccgcagggaactggaacagaagtacggattgcatccggcagaacgtaaaaatcagagattggataatccgttgcgcaaggtggccgcatcggcaggtgatgtgaagaagcaggtaggcaacaccgtgaaggctctgaatgggcagtaccgtttccagacgatgggcgaataccgtgcgctcctttccttatataatatgacggtggaggaagcgaggggcaacgtgcgcggacgggagtatcacgggctggtctattccgtcacggacgacaagggtaacaaggtgggcaacccgttcaaatcctcgcttttcgggaagtccgcaggctatgaagccgtacagaagaagtttgtccgttccaaatcggaaatcaaggataggaaactggcagacatgacgaaacgcaccgtcctttccgtgctgcaaggcacttatgacaaggacaaatttgtatcccaactcaaagagaagggcatcgacaccgtactgcgctacacagaggaagggcgcatctatggggctaccttcatcgaccaccgcacgggatgcgtgctgaacggttcgcgcatgggtaaggagctttcggcgaatgccttgcaggaacacttcaccctgccatacgccggacaaccgccgataccgctatccatccctgtggatgctgcggacaaggcacacgggcagaccgcctacgacagtgaagatatatcgggcggtatgggcttgctcactcccgaaggtccggcggtagatgccgaggaagaggctttcatccgggcgatgaagcgcaaaaagaagaaaaaacgcaagggcttgggtatgtaatcagagtatcaacaattaaaaaatcaatgtatgtcacaacaagaagacgatttgagggcattggcgaaaatcatggattttctgcgtgccgtgagtatcattttagtggtcatgaacgtgtactggttctgctacgaagccatccggctgtggggcgtgaacatcggcgtggtggacaaaatccttctgaacttcgaccgcacggcggggctgttccattccattctctacacgaagctgttttccgtccttttgcttgccttgtcctgtctgggtacgaagggtgtcaagggtgagaaaatcacttgggggagaatctggacagcatttgccgtcgggttcgtgctgtttttcctgaactggtggttgctgcccctgccgctgccgcttgaagcggtgacgggactgtatgtccttaccattggaacgggctatgtctgcctgttgatgggtggtctgtggatgagccgcctgttgaaacacaatttgatggaggatgttttcaacaacgagaacgagagtttcatgcaggaaacgaggcttatcgaaagcgagtattcggtcaatctgccgacacgtttctattacaggaaacgctggaacaacggttggatcaatgtagttaatcccttccgtgcgtccatcgtgttgggtacgccgggcagcggcaagtcctatgccgtggtaaacaattttatcaagcaacagattgaaaagggctttagtcaatacatctacgatttcaagtatcccgacctatctactattgcctacaaccatttgctgaaccacccggacggctacaaggtaaagccgaagttctatgtgatcaacttcgacgacccgcgacgctctcatcggtgcaatcccattcacccggattttatggaagatattacggatgcctatgagagtgcctacacaataatgctcaacctcaataaaacgtgggtgcaaaagcagggcgacttcttcgtggagtcacctatcattctgtttgccagtattatctggtatctcaaaatctatcagaacgggaagttttgcacgtttccccatgctatcgagtttctgaaccgccgttacgaggatatatttccgatactgacctcttatccggagctggagaactacctttcgccgttcatggatgcgtggcttggaggggctgcggagcagctcatgggtcagatagcgtcggcaaaaatcccgctttcgaggatgatttcaccgcagctctactgggtgatgtcagacagcgagtttacgctggacatcaacaatcccgaagagccgaaaatcctctgcgtgggtaacaatcccgaccgtcagaatatctacggtgcggcactcggtctgtataattcccgtatcgtgaagctcatcaacaagaaggggatgctgaagtcatcggtcatcatcgacgagttgcccacaatatacttcaaagggttggacaatcttatagctaccgcccgaagcaacaaggttgccgtgtgtctgggctttcaggatttcagccagttagtgcgtgactacggggacaaagaggcgaaagtggtgatgaacactgtcggcaatattttctccggtcaggtggtgggggaaacagccaagacgctctccgagcggttcggtaaggtgttgcagaaacggcagtccatctccatcaaccggcaggatgtttccacctccatcaacacgcagatggacgcgctcattccaccgagtaagatttccgggcttacgcagggaatgtttgtcggttctgtatccgacaacttcaacgagcgtatcgagcagaagatttttcattgcgagattgtggtggatgccgaaaaggtgaaacgggaagaaagtgcctacaagaaaattcccgtcattacaaacttcacggacgaggacggcaacgaccgcatgaaggaaacggtgcaggcgaactaccggcgcatcaaggaagaggtgaagcagattgtgcaggaggaactggagcgtatcaaaaacgatccggtgctgtgtaaactgctaccagataatgagactgtctaacaagtccccaaaattgaaaattatccctatcgaagtttgaagtgacccccaaaagttggatacaatttttttggggggcacttcagttctgacgggtaaaatcgtaaaattcggacttgttagacaaatacttacgcggtttcaacctcaggtactgaatctatcgaattgacaaatttaaccaattgcggatctgaatctttttgtatgaggtttcggagactctttttcaattcataagcatcatcccctgctgtatttattaaatccatataaaaatctttgttttgcagaatcaatgaacggcatgccccatcggaaattacaggtttcactattttatcaataacgtctccagcttgacttttcaaattaccatgcgatctaagccatgtttcgaaaaattgaaactttattgcattgatagtctttttaccgatgcagaaatcatttcttatatcggtaactgtcgatttaatttttcgtttatccaatctttcaactatattcttgaaacaattagggaaaggattcaaactttgagttccagaagcaatatccatcagaatctttttgccaaattcagtcaagttatctggcaaggatttgattttagccagtaaatgttttattgcgacaaaccaataatatgatgtatgtgctgttctttgggcgtataatgtatcaacacttatttcagacaacgcttcgaacgctattttattgatatgatcggtcaggacattgcttattttagtggtcaaatcgtaaaaagatgcgtcaggaattacatctttaatattgttcttagtgatatacttatccaaatcggtattccactctgctaaatgctcgataaatacctcatccgttacacctattctgttcttaatatcttcaaattggggcaatatgtctgagagcaataatttatagccaagtttatgatttaccatgtattgtagtgtttcatttaatagcggtatattccatcccacactatttactaataagtctccatgatccacataatagtccatgagttctgcaacatattttatatctccaccctctattaaggaaacggaatgaccatgtgccaattgcatggcgactaaatcgtaatatccagactctttaatgtttcggccatcagtttctaattcagaatgcaactgatttatgtaggttgaatctaacgttacaggtaaaggtctttcttcgtcagatgccaataaacgataggttgtaaatatagcccctatattatctttatttacattctgttcatcaatgcaattcgtgatcgcttgcaaaagcgttggaaacgtataggtagaattatcttttaacgtttttacaatatctgcatggtcgaaattatcgggtagtaagtttgccaaataattatcgagcgcctccgaatttgttgctacttgataatatttatatgctttagttgtcgcgttatcccgataggcagcatctgttgcatttgcagcttgaatataatcgataaatgtatttggcttgactgtttttgcttcaatcaatgacgtaaaatcgcacgccaacttattttgcgcaataaacctgtctattgcatctaacgttttgaaatagtcgccgccattgaagtcattgaaccgaactatcttcttatataattgagcaatcacatggttttggctttccgtgtctaaatgcaacagcagttcttggtattcgacagggaacacctgcttctctatgaattcttttaatttcaattgtgctattctttgccatacacgcagaataacatcgctctttcgagttaatttatgcaaacaatgtataatcttatcgataagcgcattgtccatacattgtataacttcttctaatacagtgtcaaattgtttattagtctctgcatattgatttatgtcgtggtcttcttctccgttgatgcagccttcaatatattttttcaatggaatttgtcgagcatcttcaacatcgacaccatataccaaagctgcaatttcgcgttgtgtttgcagatcattgttaattattgtttgaatgccattcagatagtcgccggacaatatttgttctactggatttgccagaatatccgtcttcttcaaacagaacaatgctatgtttatcatcaaaatttcgttacaccactcttgtttaagagcgaccatctcattgatatatgatataatttccctaacattggcattaggatttaccaatctgaatatccgatttatagtttctttcgcttcattttctgtttctccaaatgcttcaacaaacagtttgttgaatatacttcgatagtcggtaataacaggaggagcaacacgataaacaatagggaaagttttattgataaaatacttggtcagttgtttcgtttgttcgtcggtctcatctccgaatgcacaagctaaatgtgtttcatcgaaaggaataacagcccaaacattttcaaaaccgctatcggcgaagaacgtatggatagaagaccataattcttttactttttcagcggggagacgatccatgttgtcaaaaacaaggactaatttacgttgtcctttttccttgataaaatcagaaatgtcttgcatccatgttttgaactcgtaaaccgttggttcgtcttcgctcaaagtctcatagcaaacgtccttttcgactttatcttgataaatagctaacatataactccatccatatttatgatctttgctatatgcccatttccaaacgcacaatgcaataagaactggcagtgcagctatgataatagacaataaagaaaaccaccatgttgtgggtgtaggttttactgcatacgcaataaatgtaaatatcggagttaaaactgcaaccaaaaatgccgcaaccataccattactgataaggggatatttttcggttacggtctccgttttacgggctaataaatatttcagcttttcagaccatgatacggttttcgtacctccacctttgacttttattgttgcatttccagataggataccatcatcaataagtttgcttgtaagcaattccaatatagagcggcgttgcaagtcctcttgatgtccccatgcgtcatactcaaaaaagtaatagtcgtctgataattcacgttccaacattttaaccacgttggattttccagatccccaaataccttcgatgccgataattcgaggtaaagtacattcctcatccaatgaatcattctgacaaaaatggcgagcaatagtttttgccaacctttcttgcgaacctccatcgaatttgtcaataccacacggtttattttggataaaccgcggatattgctgtttggattgtagttttgtttccatatacgtaatttattgattatacgaactccaaataattctcccgatttaccacatgaaactcggcatagggataggcttcttggaaggctttcggtgcggccggcattttatttccccacttgaactccaaggcggtaagactgtcggcactctcctcaatcaggtcgatttcctgtttgtcgtaggtgcgccagaaatagaactccctgtgcagtccctcattgaagttcgctttgcgccgctctccgatgatgtagttctcccacagcgcaccgacatcctgccgaatggccagcggtgagaaagccccgataatggcattgcgaatgccgttgtcgtagaagtaccacttgccagcttttgtaacctccttgcgtaggttacgcgaataagcccccagacgatagataacgaagaccttttccaataggtcgaggtatttttcaacggtcgtcttgctcatgccgagttgtttacctaactcttcgtaagaaacttcgctgcccaactgaaaagctatcaatcgcagtagatcgcgcatcttgctcgaattttttaagccgtcaattgctaagatatctttaagcaggtatgcaccgacaatatcacgtaggtagtctgttttacgttcatagttctccatcattactacttcgggataggaaccgtaaatcaagcgcgcttcgaggttctggcgggtttcaagtgccgtttccgtctgtgcgatttcccgttgcgagaatggtgtaaggagaaattgcgtactgcggccgaccaacggttcaccagtcttattcagcaaatcgaatgacgaagaaccacttgccaagacacttattcccggtatttcatcaactatcaacttcagaatactaccgatttgtggtatgttctgtgcctcatcaatagccagcaaatcaataccatccaataaatgccgataattggctattgagcgattctccaatagtgctaatgtgtcgtagtcttcgccgttgagcatcatcgtcctacctgaatagttgtccacaattttacgcatcattaccgttttaccaacacggcgagcaccaaaaatcagtactgctttattgggcgcgattcgtgctgtaatcttctcttgaagtattctatttactgtttccataccttataaaatataatgcaaagataatcatatttttttaattggcgaattttacaaaaaaaacgggctattaaatggcgatttttacaaccacaatcttatggaagttgtttcattgtttttagtaatgatatatgttcatactatgatgactcaataatttaccagacatacgtttctgaaatttgtccttataggaatgaaaaactcacatatattgtgctaattaatatataattaaatgaaaataaaaagacaggatacgagtattcctgtcttctcatatgtaatggatatttttttattttctcatccgctccaactcctcatcacgcaacattctctcgttcagtttttcctgcatcctgtcaatgaaataggtgcggctttcgttcttccggcgtttgatatcagtgtagaagcggtagcagtctttagaatcaaccccgaatatcttatagagaagtggggcgagctgtttgagcggcatattgccgttgttgatgcagcccatcacgtctatgccgtagataagttccacgaggtcgatggcattgcccgtccattgaagaaggctggcggtggtttctgttgcgttgttggcggatattagtggtggcacttggggcgtggcaaggaatttctgcatctttcttacgaaagacagagccttgctgacgtaggcggcaatctctcttttttcttctgacagattacgtacgggatggtgctgcaactcgatttcgatgtaggcaagcgcgatgacggtaaggttcatgtccatgccgccgttgcacagttcgatcacttgggtggcgaaagccgtgtatgccgtttccatattgcagtcgccggcttcgtttatcaggcggaaaaagtcggtttccgccagcaagaaataattcatggttctgtcaattttgaaaattacactttgttttctgcgtgcgcacatgaatataattggcaaaaaacgcggcagaaaataaaaaatccaacactcaattttacaaagtgctggatttcagaggtataaaattcagtatttttcacaaggacaaattatctccgacttaaattgtttgtaatcggaacatttattctattcctgaaaatagaaatgtatgcttgccgcacattttggctatcttgcttttttatcaaggatatagataatgcgacatacaccgttgggatagcttttcaaagaggaaagcgtccagtgttgctctggcagagccgacttaaaaaaatgtcgtccgcttccggatatgaaaggaacggtgtatagtatgatttcatccacagcgtgcatccgcagcagtccgtttatatagtctgccgtgtccggtgtggcttccgcgaggtaacggatgtttgtgcagtcttttctccattcgtgcagcattgaaatggaatagtccggtgtcacacggtaaaaggctttcttcctgatttcatcaagaccgcaacggtcaaggcacaaatcctgatgtgctttatcatataactctgaagaaagacatccgtccatcgtcagtacggcgagaatctgaactttacccataatcgtttcctttcgttaggcaagggtaaaaaagtagcgtgcaattcacactaccttcaagcgatggctctggtaaagcctttacggagagtacgtgaatgcacgctatgcgtaagcatagcataagcatcacgcaatcgtctccgtagttccaatttaccagattttcgcttgaaacgccttgcggtcttatcctatatgttggcggcgaaaagctcctgccaatcgccgtttttctcaaatgttatgcaaagatagccaaattcagtgaattacgggctatgattgcttgaatttatatttaagtccatactcttcaagtttgctgtatagtgttgtcctgcctatgccgagcagttctgcggcgacactccggttgccgtttgcctgtttcaacgcacgcaatatccgctccttatcctccgcgtcattgcgcaaggcgaagctgacagtagaggtcggtttcgtcacggcaagttccagatgctctttcatgacaacaccttcctgcgcctgcaatacagcacccataactttctgccgaagttcccgcacgttgcccggccatgcgtgtgtcagcaacgctttacgtgcttcggaactgaacccgctcacgctacactccagctctctgtttgccatatcacggaagaactctgccagcggcataatgtcttcttgacagtcacgcaacggaggaacggttatcccgaagtcgtgcaggcggtacagaagatcctgccgaaaacgcttttcattcaccgatacctccaaatcttcattggtagcagcgatgatgcggacattgaaattccggtctgccttgtctccgaccgggcgataccgcctctcctgtatggcacggagcaacatctgttgggtttccaacgcgaggtttcctacctcgtccagaaacaacgtgccgccttccgcctcatggaaatatcctttcttggcattgtccgcacctgtaaatgcacctttgacgtgtccgaagaaagccgacggtgcaagctctttggagagtgaaccgcagtccaccgccacaaatggcttgcctgcacgtttgctcttgtcatgcaacaggtgggcaatatgctccttgcccgtgccgttctcaccaaatatcatcacgctcatatcggtggcggctaccagccttatgcggtgcatgattttctgaaaggcggaaccttcacgggcgaatataggcatacggcgttgtcctgcctgacgttctttcagtatggaacggatcagggggacaagtttatcctccacaagctgtttgggaatatagtctatcgagccgagtttcatgctttccacggcggtattaacttcggcgtagtcggtcataatgatgaagggctgcatctttccctcctttcgcatccagcacaaaaggtctatgccactgccgtcaggcagacgcaggtcggcaaccacgatatcattatctgttgcctgttgcagatgtttcttcgcggttgagaggtggtaagccttcatattgcggtagccctcccgtgacagcatattgcagacatattcgcaatacacgatgttgtcttccaccacaattatttttgtcttattcatcttcgtattttctcctttcctcttctgccaaccgtattatttccactcccttatccagcacggcagtcacggcatggcttaacgcttcaccatccgggagagcatcgccacgaagcaatccgtaaagtacattcagcggttggtcggcacggagcacctcccacgaactgcgcaggtggtggatcagggaatccagcttttgcaggtctttttcttttgctgcatcccgtaccgcctgcatttccttttctgtttcagttatcaacttttccagcatgacggcttcattgccataggacaataaggcggaaaagtccggtttcccgtccggtgtcgcttttatggcacacctgtcggaaacctccatcagttccgatatggagaacggtttgaacaggcatccggcaaagccttttgccaatagttcccctttgttacaactgcccgaagcggttgccacaaccaccgggattgttggtgaattgcccacgttggacgaacgcaacagttccagcaattcgaaaccgtttatatcgggcatattcaagtctgtcagcaacaggctgtattctttctggcgtatcatttccatcagtgccgcagcatcggtgcaagtgtcgcagtgtattccttcttgggaatacatctctttcagcatcagaagtaatacctcatcattgtcaatggcgacaacatcatggaatttattgttatgataaacaggtgtattgcttgtatatccaagctgttcttcagcttcctgcatagaaatttcaactgtgaaacgactgcctttccctttcttgctgtctaaacggattgttccgccaagcatcgacacaatattacgcattatggcaagcccaagcccgaaaccctcctttgcggcggcatttgatagacgttcaaacgcaccgaacgcttgtttctgttcctcttctgtcatgcctgtacctgtatcttcaacgaccagtgtcagaactccattatcatattcagtaatcaaagaaacaccgccttcttctgtgaacttgacagcgtttgacagcaggttattcccgatttgtattattcgctctttgtcggtcaatacaatggcatcgtgtccagtcttcacggacaaggacagccctttgttcacggcaacaggcatgaactccgtttcaagtgtgtgcgtgattgctgaaatccggcagggtgacagacggggctgttccttgccgttgtccaggcggaagaagtcaagcaaagtgttaagcatatcccgcatacggtcggaggattgcagtatgttttggatatactgcccggacttatcctcacactgttctttccgtatcagtccggcatagcctgttattgctgtcagcggtgtgcgcagttcatgggtgatagtatgtaccgccttcttccttgacgttatcagtgcctcgttccgttgtacggattgttccagttgccttatcaaatcagttgtcttgtgcttgtattgtttaatgctttttgcatcacgatgtatgatgatgtaggaaattaacaacaatagaagaacgaatcccattaaaccgcctacttgcataaatgacttttcacgcatggcaactatttcgttttcccggctttgcagttcggtttgtaccttttcttctatttggcaaatcaattcttgcagttgtctgttaagtcctgcattacgagctgcaaggctgtcggcttgttccgacaattggcgatcctgcactttctgttcgctgattacgtttctattgaccgaatgaaggatagtggttgatactgctggagttacttccttttttttgccgaatatgcctaagaaaccttttcgttttggctttttggactgttcctgcacacttttctgtacaataaccggaatttgattggctatcttcttgttaatagattgttgttcatccattaaccggactatctggaacatctgtcgttccttatcctctaaaagactgcgcacactatcgatgcgctctgctggataggtggccttgaaacggcagagcatactgtccattgccatacgccgtgcatggtaatgctcgatatctttatcgttccattccagtattgtttcacccaatagagaaaattttatcatttgaatattgatattgtttatttcttttcggagctcgtctatttttttattgccaagttctaatgcttctatctcctgccattcatagaggctattatatgccatacatccgataagaatggagataagtatatatcccaaccgtattgccttatagaaatttcctgaccgctccattattttaatgacattgatttttggaacatgaataaaagtttatctttttcgttcatgcggatattatcagaataaccgtcttttgttatttgatacccacatggcttaaccataaaaatgcctaagcccttagtgtacgaacttacttctgaggcatagtctttacttgtatttaatggaactttccctttaatatgacaccactcattattacaactgatgtcttcaatctcagacatcagtttttgcaaatctgtaatagctttggaactcgctacttggggtatctgcaactcaaaacagagcatcggttcgagaatgtccacacctgactgttgcaaagccagcctgaagacataaggggtcagctgtctgaaatcagcaggtgtacttaccgggctataatactcggcttgagtaaaagttactttcagatctgtcacttcccatccatgtaaaccagattggcaagacatacgaatcccttcaaaaacggcattttgaaaagaatggttcagataaccataggagatgtcactttcgatttgcaaccctgcccctaacggtaagggttcaagagtcagccctattgtggcccagtaagggttgggtggtacttcgatctgaataatcttattgaccttttttataggtcgttctttgtagatagtcttgatctcatcaaaatggacctttacggaaaatcgttcttccagcaatgtctgtatgatttccttttgggtcaaaccatataacgagatttccaattcatcactatatgagtttatggaaaaggacaaagacgggtcttcaatccacaatgtattcagagcggatatcaccttgcttctctcttcgggcttatttggccggacggaggatttgagagcgggatgctgatgagataatccttgaatcaaacaaggtttagcacctaaataatctccgattcgaaaatcttctatatcttctacaatcgcgatatcattggcacccacttcatcaacatttatctctctgccctgataaatagtctttagatttttaatcttgatgaatttttccgaatcgttgattcttacaacgtctcgaagtctcagacttccgtcaattattttaagaaaacttcttttatgccctttggggtcatgctctatcttatagagataagctgaaagtctgtttgagactgatgccggaggaagtataaaagaagaaatggcgtccaacaactcattgataccgatattgaacattgctgatccatgtagcaccggatagactttggcttttgccacaagagcgattatcgtattccaataatcagccggtgaaatttcgctatccgccaaatatcgttctaatatatcgtcgtcatggttgcatacaaattctttgtattcttcctttatatatgtttgggagcaaaccggataaaccgatccatcgacaacagtttgcataaacaggacatcttgcgacagatttgtttttatatccatatacaaacgctccaaattcacaccggcacggtcaatcttattgataaatataattgtcgggatttgcagcttttgtaaagtactgaacagcaactttgtctgcgcttgtatgccttcctttgcggataagatgaggactgctccatcaagcattttgaatgtccgctccacttccgcaataaaatccatgtgtcccggagtgtcaatgatattgcatttcactccattccagataatagatgtcgtagaagcccggacagtaattcctctacgtttctctatatccatagagtccgttatggtgtcaccattatccacacggccgcacttttccgttgctccactggcaaacagcagattctcggttacggaagtttttcctgcatcaatgtgagcaagaattcctaaatttataatattcatttggattaagcaataatatactacagtagatgcattgtcgaaacgcaccttttaatacctcctcgtagcatatgagaactacaggattactaactcgtattaatatgtatattattactgccgcataacgattacaaaattacacaaaaaaatatatctaacaaaagtgggaggattttttaactttttaccatagacattttattagggaagcgtaggttcaactggcaagtacaaataagtagaaatgtttgaacaacaccgttttaggaagttgaaaaatcaagtttctctctcggtatagcgtttattttggccaatatcttctttagtttagcatttgtgtatttcccattcgtgttctatttagctccttattatgagtatgtagcaagttacttatcaaattcagcctctttgagggtcaaatatggttttgcaaatggtgactgacaagacataaacaaggtcagcaggaattttttacataaatggacatgaatgtatataacctaaaataagaataaattttaataagggctgcccaaaaagaaaaaaatgcagttgccatcctatagatacttgcagaaaggataaaatttacttttagaccttttgggatagcccttattaatacttcagataaaattccttaggttatattttcaatcctttggaccgggtttcctccttggcatacagtcccggacgcccgattatgacatggttggcaacgatactatccgccggactgcgtatctgcggcggtgcattttcgggatattgcgcctgcctgttcctcacatcttccgcttccggcttgagctgttgcccttcattctccttttctgcgacttcgggcgtgggtggcgcaagctccagctgaatttttcggtcaagggcggcaagttcggacttcaactgcttcagctcgtcctccttcttccacaccttacccgctatctcctgtaactgcggtatctccatctccagcacctcgttcttcgccttgtactggtcgatgatggagggtatcctctccatcgcgttgaggaagttgcgggcggcggccaacgggtcagccatcgccagatgcccgttgttgtaggtgtacttgtagttcccctcgaccacgaagcggttgtcggtgaactccaatccctctttgagtatcctttcgctcaccacctttatcggaaaaccgtaaagttcaccgacctacgtgtacaaccctccggtcgtggcattcttggctatctcctgcaaacgctttccgatgaccttctcatcggcggaatccactccgtccacctttattatattaaggcggttgccctccttgtcggtctgcaccaccgacaggaagcggttccagtcctccgtcatggcatctatgaaagccgtgttgttgcgcaactcgccggtctttgactccagcttgaactccgaatcacgcttgcccttgttgaacgacttgcgttccccttcgagcgatgcgatccgcttttccagtttcgccttgtccaacaggtcggtattgccggagagcaacgccatgtattccgagaaattcatgcccgatttttcgtccattgccccctcgtcgatggtacgcgcacccatcgcaccgcttttgagctggcttatgaaagtctgcttgcagtgcaggaggttgaacttgtagctgtccagtgacttctccaccgcgtagatgattacatccacgttgttcccggcgaaatgtttggcaatctcattacctgccctaactccgcgtccgtcacgctgttgcaagtcggacggtcgccacggcgtatcgagatgatggatagccacacaccgtttctgggcgttcacacccgttccgagcatagaggtagagccgaacagcacacgcaccgtcccggcgttcatggcgtctatcaccgccttccgcgccttgtcggtcttgcactcctgaatgaagcgcacctcgcttggcggtataccgtagtcctccgtcagtttgcgcttgatttccgaatagacgttccacccgtcgcccggctggtatgtccccaaatcagagaaaacgaactgcgtgcctttctgggcgtcgtatttttgataatactccgcgatcatcttggcacagtgactcgctttgttgtcgggatgatcttcgtaattcgggtctatcatgcgcatgtcgagtgccattttccgggcatagtccgtggcgatgagcatcttcgccttttcttccgtttccgaaagcggcagcctgcccaacaaggtggcatcgcccgtcttggcgaactgcatcagtttctgtatgaagtcctcctgttccggcgtgggcggtatatggtgcagtatctcgttcttggcaggacggtcaacgcccacatcctccgccgtgcggtagtccgtgatttcattatagaaggcggcaagctccggcactttgatgaagtagcggaaacgctccttctggaccacattgttcgtcacgttaaattcaaaatccgtcgtcttcttggcaaatatcgccgcccaagcgtcgaaacaccttatgtcctgccgttccagctccttcgggcgcaggtacttgaacagcaggtacaattcagtcagtgagttgctgatagtcgtgccggagaggaaggtcgcacccaagtcttttcctgtgcgctcctgtatggtgcgtatggcaaagagcatgttaagtgccttctggcttccctcgctgtttcccaatcccgccacacggtcgtggcgcgtgttgaaagtcagattcttgaactggtggctctcatctatgaagatgtggtcgatgcccatctgcttgaaatccaccacgtcgtccgtgcgtgactttatggcgtgttccaccttctccagcttcgcttcaaggttgtgcttgcgcttctccaatcctttcagcatcgcccgcgacacgttctttccctgctgccgtagcacttcgaggttttcctccaccgtgtcaagctctgcttgcaggatgcgctgctgcaattccggcgactgcggtatcttgccgaactggtcgtgcgacatgatgacgcaatcgtagtcgttgttctttatattattgaagaagcgcacacggttggcggtcgaaaagtccttctccgaagcgtacagaatacgtgcgttgggatatgccgcctgataggtggctgcaatctccgcaacgttggctttcagcccgataatcatcggcttgtgtgccaaattcagacgcttcatctcatgcgcggcgatgcacattatcagcgtcttaccggttcccacctcgtggtcgcaaattccgccgccgttctgtttcaacatccagacgcaatccatctgtgagggatagacgctcttgataccccggcttgccagccctttcaggttgaggtcgggaaaggtctgatgggagccgtcgtagcgcgggcgcacgaaacagttgaacttgcggttatacatcgtcacaagccgctccttgaactgcggcgactgctcttcgagccattcggagaagccgtttcgtatctcgtcaatcttggcgttggcgagttgtattccctcgctgtcgcgcatcttgatgtcgttgccatgctcgtccttgccgatggacttcatcatgtcagggcaggtgttgtgcagggcgtgttttaggaggtgcataccgtcatagttccggtaataccccttcaccagaaactcgtccgtgattttcatggtgcggtagccgcacaccaccgaaaactcgtccatgcttgcggaataggcgattttcacctccgtgtcgaacagccggctcatgtaggcggcatagacacccgtcggaatccagcgttccccgaaattgaagtccagatcctcgaaggcgatgcgctgcggctcggcatctttcagagcctccaacgcctgcttcacctccggcatacgctcattttcgggattgtcacccatccatgcctctatgcgttccgctttctctatgacatttccggcgatgaaacggtctttgatttcgtaaccggtcacgagcggattgtagtagatgcgcccttgcagggcagtgagcaaatcctccgccgtgctgtcggttatctcccgcatatagtcgagattgaccgtaccatatttgttgagcgacgcagacagggcttcttcgggagagcctacgttggcatggctctccaccgcgaaggaaacaggatgctcgaagatgtccgccttgacgaactttccgttttccatccgttccagcgaaaggatgtcgcgcccgcccgcatccatcatcactaacttcacgttctgcttggcgttgaggttgccgtagcgcatgacaaactcatcgtaacaggtattcagatgctctcgccacggaacatttgcctcgcgccggagcgattcataacggtacagacgctcgtaggcgtcacgcagcgacacatacaacaacgccttttccttctggtatcctttcaggtcgagcggctggaatgtcgccccgtatggcgtgatgtctttcaggtagccgatgttatgacgcccccggtcagccaccagcgacccttcgcgcaggtgcatctccggcgtgcggtggtaggcacgcggagaaaggtccacgacttcctccttcggcttttccgcttcgatgtcggggaaaaggaaagtccccaccgcttccgatggggtatctgtaacggcaggtgcggcgactgcctccggctgtgtttcctcctgtcgtggctgctcacgggaagtttccggcacggctttcacttccgtcttttccgccacttgtttctcgttatgctgccttgccagttcccgaagttctttcctacgctccggcgtcaaacccatcatcatttcatagaaaccgttgatgggaggattggtatcccagtccagtgtggcatagatgtcgtccgggtcggcaggcttggcggtgttctccgctttcacctccttattctccattgcgggttttgcagttggagctgtcggtgtaaccgtgactttcggtttgggcggagtggactttgccgtaactgcctttttcaccgtctttttctttttggaggttttcggttggctgacctcttccgtcatcccccagaggtcaagcagggtgagctgcacgcctgcggaatattgcgggcgcggttctatctccggcttttcatctgcgggttgcggcttttctgtcggagtttccaccgtctgcgccgaggatactgtttccaattttatggcaggacgctctactttattttgaacggcaactttttcttccgttcctgcctgccggattgaacccgaatacaagcgcatggcaagcctgtaatggaaatcctcgtcgagcatacggcgcaaatccccggcgatgcctgctgccttgccctcgtgcagataaaccatagcgggcttcccgtaggggtctgtgtcaagtttcgccatcgtatgcacgatgcgttccgggtggtggatgaaataggcgttgtcggtcagggcggttttcgtgtccgtctgtatcacggtcatcagccgctcgtcctgcgacatttccttcttgctgaggttcttttgcaggacaatcaggtcactgcccacctccgtgcccgcgttgtccgtgaacaggttgttgggcaggcgtatcgcggataccagattggcctgactgaacagctcgttacgcacggaggtcttggtgctattcaataccccttgcgaggtgatgaacgccacgataccgccgtcacgcacggcatccagtcctttgagaaagaaatagttgtggatggttttctgggcggagcgtctgccgaaagagtcgctccgctgaaactccgcgtcgaacacggcaatgtcaccgaacggaatgttggacaccgccaagtcgaaataattgttgaacggtctttcgattttctcaaaaccgcaggtgcgcattttctggtcgggatagagatgcctcaagattgtacccgtgagcagatccttctcgaaagccatcacatccgcattggggctgtgccgcagcatggaatccacgaacacgccgacacctgccgacggttcgagcatacgggcggggcggacgctgtaatctgccagcacgtccgcgatggtgtcggttatctctttgggggtgtagaaagcggtcagcacggacgctttcagcgaatccacaaaccgcttgtactctgtttcgtccttgctgttctcacggataagcctgtgcagctccaccgtcggggcgaacagttcgaggtcggatttcgcccaccggacggcatccgtcagttcctttgcagggttgaggatacatttcagaccgccgaaaccgcagtacctttgaagtatggcacgctcttcggttgtcgctgtcctattttccctgtcaaggatgaatgccgtccgtatcgcctcgatgttgtcccgcagtttctgtttgcggttaaacgccatattcgtctaagtaaaggacggttgctcccgtcagctccgtgtagagcaggtcgtaatcggaagacagggcgaaattgtcatccgagaggtcatagacggagaacacgttgccgacaagcggcagcagtttcaggacaaaggcttcacgcttctcttccggcacttcatcggcaaactcgttttccacgacttcgcggaggatggcgtaacgggaataatgcagcccgcgcagcagcgtgtccatcgccagttcctgcgcaccatcggcgggatagccttcaagccgtgccctctcatacgtttcggcggcacggtcggcccgttcccgtatgaaagcggtgtcgtcagcctgttcaaacttgttcgtgcggagatagtccagcaggtacagaccgtaataggaaaagtcggtctgaccctcgtttttcttcttgttgttcattactttggatttagcggattgataattaacgggataatcggttggaaaaaggaagaaaaaggcactcggtatccctccgagtgccaccactaaatccaaagtatgagtgtaatccggtatcgaagaacaattcattactctgaacaagtggcaaagttaatactatttcttccgtcctgaaaatttcttgtcctttttagcctccgggaacacaaaagtcgtgttatattccccgtcaaaggcgacaacagcatcgaaactcttgccctgtttgctcttgaaccctttgagcagcttggtatgcccttcggtgagcaggtctttgatttcatcgtcggacagggtgcgtcccgctttcagccggaacacgggcagtccgcactccgtgttgtcgcagcgtaccaccttgccgtagaaccgcatcctgcccgtgccacacttgggacacgcgcagccggagtcacggctgccgaagagcttgtcgcacgagatcagttcggaggttatctcacgtgtgtacgcctctatctccttgcggaaggtgtcgtcggacagttccccgcgctcgatacgcgccagctccttttcccattcgcccgtcatggcaacatcggcgatgcgcatcgtcttgacgacggaattgagggcaagtcctttttcggtgggaacaagcgacttcttgcagcgttccatgtaaccgcgcttgaaaagcgtttcgatgatggaggcgcgtgtggcgggagtaccgatgccacagtccttcatcgcctgccgcagtgcgtcgtcctcaatttccttgcccgccgtttccattgccgagagcagggtggcttcggtatgcagcggcttgggtttggtctttccttcggtaatggacgagcctttcggtgtcagcgtgtcgccttcctgccagccggggatggtaatttcctctttttcctcgccatagacggcacgccatccggtttgcttcacgacgctgccttttacggtaaactccactccggcacattccgccgtgacagtggtcacatccttgacgcatttctcagagaatgcctcgaccatgcgcccggcaatcatctgatagatggtattgtcctctttggagaggaagagcggtttctcacccgtgacgagcagggcatggtggtctgtcaccttgccgtcgtccacgctgcggcgtgtcggggcggcttttgcccgcaccttgtctttccattcgggctgtgtgccgatgaaagcgagcagtttgggaatttcggcaaacacgtcttcggggatgtagcggcttcccgttctcggataggttatcaacttcttttcgtagagtttctgcgcgatttcaagcgtctgttccgccgtgaagccgtgcttggcgttggcttctttctggagcgtggtcaggtcgtagagcaagggagtttcctccgtcttctccttgcgctcggctttcgtgacagtggcgcaacctgccgcctttaccttattatatagttccatcgccggttctttctctttccatttctcggaggatgagaatttcacgacttcgccgtcgcaaccgtccgttgcgatatggagctgccagaatgcttcggacgtaaagcggcggttctcccagtagcgttcacataccatagccaacgttggtgtctgcacccgccccacggaatacgtgccgtgtccggcggcgatggataacgcctgtgtgccgttgatgcccacgagccagtcggattcgctccgcgctttggcggcgaggtagaggttgtcgtatttgctgccgtcttcgagtttccgcagtccctcgcggatagctttgtcggtgagagagctgatccacaggcgcacgaaaggagtggtgcaacccgtatagtggtagaggtagcggaagataagctctccctcgcgtccggcatcggtcgccacgatgatatgttcgcttgtgtcgaacagtcttttgatgacttttatctgcgacaccacgccgctgtcgggcttgtaacctttctccgtcctgacctgacgggggacgagcgtgaatgtgtcgggaataatcgggaggttgtcacggacaaatccgcgcacgccgtagccgtcgggcatggcaagctgaacgaggtgtccgaatgcccatgtcacggcataaccgcctccctcgaaatatccttcctctctctttgtcgcgcccacgatgcgggcgatttcacgtgccacggagggcttttctgcaatgattgtcttcatgtcttcttcttttttgttgatactttggattttattttggattcagtggcggacacgggattacattttcatgcccttgcccgttttcttctgcggcttctcctgctgctgttgctggcgggcgtccttcgggttggtctgacctttctgcaacggctctctcagattctttgtagcctcgttggtcttgccatcgttgttcaccgccacctgcgtgcggctctcgttggacggagcaacctgctgtgcattgtcagggttcgtgtcgtagcggtacgggcgtcccttctccgggttgaacttgatatacatcgtggcatggaagccctgcttgtcggtcacgttctccagcttcacggctttacccgccacatagtcggctttctgctggtcggtgaagctcacgccgctccatttgctgatggggcggatgctgccgtcctcgttcgtccacgtgttgcggcgttgctccttcttggtctgtgcggcattttccccgccctgcgcctgacttttcgatgtgtcgcctttggtttcctgtgtctgtgcggtacggggcgacttgccggttcccggcacgaactccacgccgcgctgctccacgttcacttgcagggtggtgacgaactttctgccgtcgttgcgctcgatgagcttgtcgcgtacgggcagtccggcgcggagcatgtcccgctcctgcgtggtgatttccgtcttgccgatgcgctccgggatgcgcaccctgcttgccggaatgtccgtgatttcattcgtcttgcggtcgatgctgatgtaggaggggatgatctcgcccgtttccctgtccacaatgtccacgaccctaccgagattgcccgtttcgcggaggttcttccggtcattgtcggagaatttgtgttccttgtactcatccagcttctgctccttgcggatgaagtgcggcacgaggctgatgtttccctcaccgtccttcttgaaggagaggcgggcgtccagctcgaatgattcgccgccgaaggtcggtttgacctttaccaagtcggacttgccatagttgagcatcttcgtaaggtcgccggacttttcaaggttgtcccgctttacgccccatctgtcctccagctcctgccagttgattttactctcgtcgatgggctggtagccacgtttgccctgcatctgttcggatttgtcctgttgctgttctttccgttgttccatgttctcctgtttttgaggttcttgtttctctgtctgttgtgctgccatctcttcctgcaccttcttctcatagtcggaggtgtccaccttgtgaggggcgagcagctccttgttcgcttcggggtctttcagcagttgcttcatcacctctaagagattttcagcttggtctgccgcaatgcggtagaaaccgaagcggctgggttccttgcactgccggaagaagttcttgaagaagttgtccagcacgtcgccatgtcggtcgaattgcaggaaactctgcgcgttctccgcttttgcgggggtgcgcttgggtgtgccgtccgcgttcagcccggctaccacgctgatctcgcctgtcttctcgtcacggactaccagcacgtccttttcgtcttttttctttgccatctgaaaaatgttttaatgggttatttatgaaagaaattatggatacgagccttgtagaaggctatatcttcctttttgaagtccttgatatggttggaaaggaatgtcagcacgtcctcctcgctgtaataggtcttcttgcccagcgtcttgtagggcaatgcgcctacgctgcggtagcgttggagggtgcgtttgcttatctggagcaacatgcacaaatcctgattgtcgaaaaggcggatgctttccgtgatagtgggctgtttcccctcagccttcatcgccagcagcagttcgtcctgacggtcgagccgttccatcagcttctgcatccagccctcgaagttgtttcgtgtgagcagttccatgacctatgtcctccttccttttggtttgccgcccgtgcgcagcgtgtggttgtggaacagggtgtctattgtcccttcctcgttccttactgtgttgtcctccaatagccgcagtatctcggaaaggcggtagcggcagcttccgcgtaccaccacatactcgatacggtggtcggtgcgcatacgctgcatggtgcgcttgctcacgttgagcatcttcgccgcctgtgccgtgtcaagcagcttgtcttcggtttcccgcttccgtttcttctcgtcccttgcctcgcggatgtaccctgcgatgttcgcaatctgcgccatcatctccttgtaggcggaactttccattgttatcactttcatgttcagtcctttctttttgtttctgcgacaaaattcggcaataaacaaaaggggctttaacaactcactacgtgactcacgtaagatttttgcggaagatggctccgtaacccggtcaaacggcgcaacaggcagcctttcagcggaaaacgatacgtcttgtatgccgtttcgttacctttgcggcaaactctaaatgacatgaatatggaaatagtatctatcgagaaaaagactttcgagatgatggtggcggcattcggcgcactctcggagaaggtcgccgccctgaggcgcaaaagcgacacggggcgcatggaaagatggctcacgggcgaggaggtctgcgggcagttgagaataagcccgcgcacgttgcagacgctgcgtgacaggcggcttatcggctactcgcagataaaccgcaggttctattacaagccagaggaggtgaagcggctgataccgcttgtcggcacgctctatccgcacggcagatgatttgatttattcacccactgaatccgaagttatgatgaacgagaacaacgatgtttttacgatggaagacgagccgatagcctctgtggtgcaggatatgcgcaaaggctcgaaatggctgtccgcatttctggaaagctaccgtcctccgctggacggggaacgttacctgacggacggcgaggtgtcggaactgctccgtgtgagccggcgcaccttgcaggaataccgcaacaaccgcgtgttgcccttcatacttttgggagggaaggtgctttacccggaaacggggctgcgcggggtactggaagcgaactaccgcaagccgctggagtgaggcggtttcatgaaaaagtaaacgggtgacaccttttgtggtgctacccgtttacttgtcttatggggtatgtgcaatcagcaatacccggcttttccgttctgtatgaacatcacgtatgtctgccgtttctcttgtgagagtgcctttcccaccagccatgtgcggaacaggtgggtgttgtaggtattcaccctgaaagcgaccgggatgatgatttcaagggcgtacacgtccgcgtgcagcccgttttcaagctgcatgtagcggcacacctcgtagtcgttcagcacgtccgacttgcggacggctctgatggcggcgttcactgccgggacggtcgtatggaacaatccggctatttcggtggcggtcatccacacgtcgttaccggttacgctgactgccttgtcctcgatgatgattgtgtcacgtttcatggcttttctttttagatggtgcaacctgcaaattcctcgacgccgttcaatcttgcggcaaggttctccatgtcctgattgagcttctctttggttatctttgcgtaaatctgcgtcgtctttatgctcttgtgtccgagcatggagctgaccgtttcgatgggaacaccgttggagaggaatatcgtcgtggctgccgtgtggcggctctgatgccacgtgatatgcttggtgatgccgcaacgcttggcgacggcacggataccggcaaggcacgtgttataatgcggaacgggaaatatcctgccgtccccgcacagtccccggtatttgccgattatgcggttggcgatgtcgagcaggcggatgttggacaccacgcccgttttctggcggttgatgtttatccactcgtgttcgtcgaagtaggtgcggatattctcttccgtaaggttgcgcatatccgcgaacgacagccccgtgaaggcgcagaacaggtagaggtcgcggtacaattcctgtttggcgtttttcagtttcccctccatcagcaggcggatctcatctttggtcaggaaactgcgtgttgtttcctccttcttgatttcatactcgcggaacgggtcgcgcgtcagccactcgttgttgatggcgatgaataccatcgtccgtaacgggcagacgtacagccacacggtattggtgcagcagtgcttgtccgtgcgcaggaacatctcgaagtcggagatgaaagccggggtaagctcttttagggcgatgtccttcacatggtagcggatgtcgaggaactcttgcatgtgcttgtaaacggtgcggtacttcagcagcgtgcctttggctttcatgcctgcctccacctgcttctcgtagtcctcgttgtgctggcggaacacctgcatcagcgtgtggtagcggtgttccagtccgagaaaggcgttcttcaccttctccgccgtgacgaagttgtcacgctccatgatttcctgataatgcctgttgatgcgtacccgcatcttgtcaagcatacggttcgtttcgagtgccgccgtgcttctgcccgtgacacgtccacctttggtgtcccacagtttcggatcgacagtcagtttgcagctgaactgtgtctggctgccgtccaccgtgatgcgtcccatgacgggaactgtcccgtcctttttcactacctgacgcttgaggtagtagattactgaaaatgtactcttcattgtccttaatttttgggtttcaaaattagttggtgaagagtccggtgttggtacgcaaaacggggaggaacggcgcaatctttttccgtaacctgatttttcgcatgagttatggataactcactattccttagagccttgtttcgctattcgtacccgtttgtcgcattttcgggcatggttacgaacaagtaacgtagcggcgtcaggatttggcttcggcagggattgtaatggcttcacggattatcgccacttcaaccaaaacccttgtaactcaattctatcactatatctttccgcatttcacttttttgtagtaactttgcatatagtaattttaaaaaagccacaactatgtttaattcatttggcaatatctttcgactcacaagtttcggtgagtctcatggaaaaggaattggaggagtgattgacggattcccatcaggaattaccatcgacgaagaatttgtacaacaagaactaaatcgccgtcgtccgggacaatcaatccttaccaccccacgcaaagaagctgataaagtagagtttctttcaggtatttttgaggggaaatcaaccgggtgtcctatcggttttatcgtttggaatgaaaaccaacaccccaatgactacaacaatctgaaaaatgtatatcgtccttcacacgctgattacacatacacggtgaagtatggaatccgtgaccatcgcggcggcggacgttcctctgcacgcgaaacgatttcgcgcgttgtagccggtgcattggctaagctggcactccgccaactgggagtcaatatcactgcctatacctcacaggtaggtcctatcaagcttgagggtacttactcggactataatttcgacctgatagaaaccaacgatgtacgttgtccggaccctgaaaaagcaaaagaaatggcagaccttatatataaggtaaaaggtgaaggcgataccatcggaggtacactgacctgtgtcattaagggatgccccatcggattgggacaacctgttttcggtaaacttcatgctgccctgggtaacgccatgttaagcatcaacgctgccaaagcattcgaatacggtgaaggattcaagggattgaaaatgaaaggttccgaacagaacgatgttttctataacaataacggacggatcgagacgcacaccaatcactccggaggtattcagggaggattgagtaatggtcaggatatctatttccgtgtagtgttcaaaccgattgccacgctgctgatggaacaggaaactgtcaacattgatggcgtcgacaccactctgaaagcacgcggacgtcatgacgcttgtgtattacctcgtgccgtacctatcgtagaagcaatggctgccatgaccatactcgattattacttactggataaaacgacgcaactctaatgaacgagattcagaaatacatagcggcacacgaaccaaagatgatggatgacttgttcagccttattcgcattcccagtatcagtgctctgccagagcaccacgacgatatgctggcttgtgcggaacgctgggcacaactgttattggaagcaggtgtggacgaagcattggtaatgccctcacagggcaatccggttgttttcgctcaaaagatcgtgaacccggatgcaaagactgtattaatctacgctcattacgatgtgatgccggccgaaccattggaactctggaaaagcgaaccgtttgaaccggaaatacgtgacggacatatctgggcacgtggagcggatgatgacaaaggacaatcgttcattcaggtgaaagcatttgaatatctcgtcaaaaacggattactgaagaataatgtgaagttcatcttcgagggtgaagaagaaataggttcacccagtctggaagctttctgcgaagaacataaagaattgctgaaagcagacgttattctggtgtcggatacgagtatgctaggagctgaactgccctcattgactactggtctgcgcgggctggcttattgggaaatagaagtgacgggaccgaatcgtgacttgcattccggacatttcgggggtgcggtagccaatccgatcaacgcgctttgccagattattagcaaagtaacggatgccgacggacgtatcactgttcccggattctacgatgatgtggaagaagtgccgcaaaccgaacgggaaatgatagcccatattccttttgacgaaaagaaatacaaagaagcaatcggtgtaaaagagcttttcggagaaaaaggatatagcacattggaacgtaacagttgccgtccgtcttttgacgtatgtggcatttggggcggatatacaggagaaggttctaaaaccgtactgccttcaaaggcttatgctaaagtatcttgccggttagtaccgcatcaggatcaccataagatttcgcaaatgttcgcagattatattcttagtatcgcgcctgatacagtacaggtaaaagtgactcccatgcacgggggacaaggatatgtgtgcccgatttcacttcctgcctatcaggcagcagagaaaggtttcgagatcgctttcgggaaaaagccgttggcggtacgccgtggcggaagtattcccatcatctctactttcgaacaggtattgggaatcaaaaccgtattgatgggatttggactcgaatcgaatgcgatccattctccgaacgagaactgctcattggatatcttccggaaagggatagaggcagtcatagagtttcatcaggaatatgccagacgataaagcggataaataacaatcaagttataaacgatacatataaaagagtggtgaacaagcttgattacaagcatttgtccaccactcttttatatatctatcacactgacaaattacatgaccggagtctcgaaaaggaaggtaaatgattggctgtctttcaaatccttcactgcatcacctgcataaatttcgccctttgtcagagacagtttcttaatgccggctttcggactaaaatcaattttcttcaaatccagccaaaacaaattcggagtcagggtagattcgaaataatataccttattcttctgatcggatacggaacgccaacgggtagaagatatataaggcttctccggtgtattaataccaaatggcacggaaacattacgcatcacactcaatacgctggaaactgcaatctttgcatccgcaatttggggaatggcatgaatgtagaatgaagcccgtacaaaacggtcgcttgcccgattggttccgggtaacatctgtaagccaccgatttctttccagtaatcattaatggccaactgctgttcatatcgaggagaatttgtcatcacccggtattcttttccttcgtgaatacttaatttcccatccagatattccaatacagccgtattgcctgtttcatcggttatggccagatgtaaggtagactccggtcctccattcggcatacggggagcatcaatgcggaaagtctcctttttcaattcatccaccgcttcgcgtaccgtggcaaagttatcaagcacatactgtgtccaaatgctgatgcccattgccggacgggtatcgccgggaagagagtaaatggattccggcaagaaaagcaggctagccactaatcctttctcgttcattccgtcacaagtacctatatcatatcctgtagcaatcacacttccatatttggaagtccagttcacagttttctctttgttatgtcccatacgttggataccacgcggaaatacatagatattcgtcatgatatcttccttccagtccattgtacgtcctgttatcaccatctggtcagggcctatatacactgcacgcgtacatgcttctacaggctgtatactcatcaaagagacggcagccaacaccaatgcaactcctgctaattttttcttcatgttcattctatttaaataattgatcttcttatttataaataacaaacgcgccacgattattgcctaaaagaaagaggattttaatgaaaaaaaggcatttattcaatgcaggaagaaattttgggttttcaacgtatgagggttatcatcacaaagatcatttcttagcgaaaaatattaaataaatttaagtgttactattgcagtcattgctactttagttcgtccaataaataaacatacaattatcatgataaaagggtacaccaaacaaactataatcatttgctttctattacaaggaatcgcattatcaagcagagcgcaagaacaacaaatgtggcaacgataccacgataaatgtcgaagagaagcaagtattattgacactctcccctccaaattggaaaaagccttgcattggtcgccgacaataaataaagaacaaaaagaggttatacgctatatactatggaatatggtttatgtggaaggtggtacagccaatctcggagacaacaacaactatcccgtggatgtagcctcttttttcatcaaccgatatgaagttagtcaggatgaatggtatgtcattatgggagaaaatccttctaaccaacacagacgtaactatccggtagaccaagtcaattggttcaacgctcaacgatttacccaaaaactttctcaattaagcggtctacccttccgtctccccttcgaagcagaatgggaatatgcagcacgtgggggactaaaaaccaagaatttcatctatgccggcagcaataatgcagaacaggttgcctggtttagagaaaaatattacaatacttacgtatccaaagaaacaggaacgaagaagcccaacgaactgggactttatgacatgagtggaaacgtatatgaatggtgcatggactggtatgacagaaaggttccttttaccggaaacatcgctccggttataagcgaaaaagatacgcataaagtgttgcgtggaggtagttattataccttcgagaaatattgtaaagtcaccagccgctacggagttaacccgcaacgatgggatattgattacggattacggttggtaatgtcactaccaaattaaaagaggagcatattattcactgtattattttagctcctcattgttctaaatactgttattatatacaaatgtcaagtcgacttattgatcggccagtttatagagttcatatcctcccaatgccagtacataaggcagattaagaataacgtcggcatccttctctacctcttcggggtacttttgcagcaattcgttgaaaggcataatgagaggatgttgcaagaaaaccttatctttcacctcggcacgtctccaaccagctaccgtacgttcggcattccatcggtatttctccatgcgcaccagtagatacaaaacttgagacggtagattctcattgaacatagatccggatatgcgtgccggcgaacggtcgctccgcttaataccgtagcctagcgtacgacaaaatacactataggcatccagttgatagcggttagcccaacgtaacggctcgctcaatttgttccacagaaactgtgcctgatgattcatcaaaatgaaatcggcagagtggttgccataagattcatacatcttcttcaacacctctttctgcttgaggctttcatctgtatagcagcaatcgtagaggtaattcacatacaaagccagtttatcctgcaagatatttttcttcatccccctatctaccataccaaacaccttgacataacgataacgcccttgctcatcgtccactatcgacgacaaatcgttattgaaatcctgacggataagtacacgacattgatgctgataaacctcatgcggcaagttgagtcctaatgagagactcaaatcgggatcatgcacgcaaatagccactgtaagcatacagtgtttattttgtgcccattgttgtagacgggtgcgcatagcagtactacaaatgtcgtcatggcaatattctacctcaatatcgcctatctgactctctatataaggaaattgagctttgaagtagtctttctgtgattccatctctcgatctactaaagtgatgtgggtacgtatgcgctcatctgtcggcagacggtcatcgtaattggcataatggcagatacgtagtgcttcaagcagcaacgagcgtcccatccgattgaatcccacaataaccagatgcacatagtcttgactagtagcagtccagtttccatcaggttgttgcgttatgcttatggggcgatagtctagcggatcataatatctttcactatcggcagcatagagactccatagttgccgggccaaattctcgtggaggttaaagggacggaaaaaaatattaggtttcccctcaatgcaaaacacctccggcggcagattcattttctgtatgttagagtacgaagggatactgtcgaactgcacatatacaggcatcaccttgccatcggaacatttgccacgcagagcactcaccaaatgcacaatcgctatatttttagcatcgcgtccgcaacgttcttcatcacccagtacatacacttcactcgcgctcgctatgttcaaccgctgaagttcttcgatcgactcaatgttgccaaagtaaacaagcacttgccgctctatttcgacgggcaaggcagactgtatgcgatggcgtaccgttgccgcctctataccgctcatcagcaagatacgtgccgaaggacattcgttatatagttcgcgtatcatattgatagttagttcattgaagcctatcaatacatagtgttgagttatgttgcggtaagtcattcgccccgtgtttaccacatccacacgccgctctataatgttggaaatggtagagatgagcacaccgcccaataaaatggatcccgaaaagctaacaattcccagcaatagcctgctggaccaagctgtctcgttcatttggttaccaggatccacaaagttgttgtacaccacccagagcctttcgccccattcctcatgtccatacaattggatagaaaagaacatcacgatgataaagaagatagccagcaccgtagcaatagtaacgagtaacagggtgagctgcgacttgatacctcccgaaatggtgcgatccatatactcttgtgagaatatcttcttgtagtagtttataaaacggttcatgcttataacttattgatagcaaaacatacaagtcctgcccatattgtgtacatttcgagctatttgttctgataatcgtaccatatcatgcaccaataccatataatccgtatcaatgggatttggttgacagtcgtgtttcataaatagaatatttagagttgtgtacaaatatagtatttttcaacaaatcaaatagtttttcacttaactattttcagcagtgtactttaccttgttatcgtatggcagtatataaaatgaaattcaccagtacaagaagacattaatcgcaagataacagctatggaacgaagtaaaattcgtataaaaatggagtaagatattctacttccatcaaataatatctccataacctttattgtatctaagattattcagtgcatagatttaagattttctatgcagaaactaagaatcttttatgcactcgagtagtcgtcacgttacaacgggacaatggtcaccttatagaatgactaatgtcactttataaggtgaccatctatctctgaaaggatgaaaatcactaaagatacaaaataaatcagtaaaaagcaatagtaagataggaaatttgcctggaatgcaaacgcacttaatttatctcagtacagcataataaagagaccgcattcatatcatgcagattaaatctaacctgctaattgcagcacctccatctctcactctcttcgtgatatgacggactttttacttccaattatcttatcccttttctattagaaatttttccggaaagtacatccatttctccattccgaacatccgtaagcggtttttcctttaataataattcccttaccacaaagcggacatggctgacctacaaacgtatctacatcacctgtagcagaaggaattgaagcaggagtagtaaccggagccggagaaggtgccgaattagaactcacttcacttgccgctttttctgtttttggtttcttttctttcggtgtacttggttttcgttcacgctttttaggctctttctttgctttctcttcggcttttgcagctactgcatcctgaatagtaatgcgtcggtttgtattatcagaaagtacactcatcactatttccgaaaccatctgtttcagttcttcgagaaactggcgggcatcgtatgtcttcttttcaatttcgcgaagcttcttttcccaaatacctgtcagttccgccgatttcaataattcttcgtgaatgagctgcaccaactccactcctgtcggggtggcaatcaggttctttctctccttacggatataatttcgtttgaacagtgtttcaatgatggcagcacgggtagacggccggccgataccattctccttcaaggcatcacgaagttcatcattatccaccagttttccggctgtttccattgcacggagcagtgttgcttcggtataaggtctgggcggctgtgtccatttctcgttcaagtcgggaatgtgaggaccactttcacccttcacaaaggtagggagtacattttcatcctcttcctctttttcttcagtaggatcttttacgtcctttgcaaacacgacacgccatcccggttccaggatttgttttccggttacccggaattctatcttatccacttcgcccatgacggtagtagtagaaatcttacagtccggatagaatacggctataaaacgacgggctatcaagtcatagacacgacgttccatatccgtcaggttttgagcatagactccggtggggataatggcgtggtgatccgtcaccttcgagttgtcaaatacctttttcgatttaggaagtgtagtgccggctaacggagccgtcaagacttcgtaatcacggagtcctttcaggatagcgggacatttcgggtaaatatcatcactcaagaaagtagtatcaacacgcggataggtagctaccttcttctcataaagagactgaatcagtttcagcgtttcatcagccgaataagcgaatttcttattacattctacctgaagagaagtcaagtcgaacaaacgtggggcaaactctctcccatctttcttgccaacactagtgactacaaacggaagatcctttatgcgttctaccaatgcctcgccttcttcccggttagcaatagggtcgatacccggattatctattttcttttttccaccgttcttttcttcttccgcagcaatttcttcatcacttttgcggataagtgcggaaaaagtggtatcccgatagttggttttcagttcccagtattgcttgggttcgaaattagctatttccaactgacggttgacaatcagtgccagagtcggtgtctgtacacgaccgatagagagtacctgtttattttgaccgtatttaatggtgtaaagacgggtggcgttcatccctaatagccagtcacccatcgcacgagaaagtccggcttcatagagtgactgaaaatctgtctgatctttcagcttcgcaaacccttcccggatagcttcttctgtcaatgaagaaatccacagacgtttcaccggacagcgtgcacctgctttctgcatcacccaacgctgaatcaattctccctcttgcccggcatcaccgcagttgatgatttcatctgcgttctgcatcagtccctcgataatgtggaattgtttttcgtaggtaggattctctatcaacttgatgccgaaacgtggaggaatcattggcaggctacctaaattccatgatttccagttaggcgtgtattcatgcggctctttcagggtacaaagatgcccgaatgtccaggtcacctggtatccgtttccttctatatatccttcttttctggtatgagcgccgagtacttcggctatatcgcgtgctactgatggcttttcggctatgcaaactatcattttttctcttcttgtttttacactaacagcttacaaagttacacgattatttctcattgaccgcatgaagagagaaaaaagtccataaaggcatagatcggagaaagaatgataacttcaactgaatagttttcaagatgtaccgctttctccttttttataccactccatttgatgtttgataagctatataatgaagctgcacagttctacacacgatatgtgcatagctctgtgcagcctctctataacgtttctattttaaaccggagaaatcacaaaaaagaggataatgtgtagaagcaacggtcacatctactcccgacagactttctatcacatcagcctgtgtcacatttacgttgtgactcttcaaagacacgataaagtcaaggcgacgtttcttaccactgacttcggtagacttatcggcactaagaagattccagttactcttcaccatttggaaaaattcgctttccaagtcgccctcattgaagtatcctaacaagaatgcaggtttattataggcagacagtttcgtttctaacgtttgaagggcctctatacgctttgccatatccgtatcgaagttggtactggctactacaaacttttcatattccactaccatggctgcacgcatctcgctctttcccgccatttggtatctgtctacacttacaggttcttcttttgtcagtataccaacaccgaattcaccgcctttataatcaatggctttagcaaagtaatcatacatatttgctttctgtgccagtacgttcaactggtcgataccttccgaacgttccgtctccttatccagtccctgcaagcagacaatatccgcattcattttggcgataatacgtcctgtccggtcgtaatcaatcacgccatctgtacctttacaataggtcaggaaatagttacctatgcgcaggtcaccttctgccttcggatattcttcaagtccggtcggcttcttaaaatcacaataaagtggataatggtcggaagttattgctacgttgacaccatccaggttgtatattacattcgattttaccacagtggtaggtggagttttcaaagtaacgacaaaatcaatccgtttggtagcctgtccggtaggaaaagtgttttctgtagaactgacaacctcccattctttcttcagttccgtaaagaatgtgccattcatcaagtcctcgttaaagtcaccagccatataaaccactttattatatgttttggcaaggtctgtgagctgttttgcagattcaactctattattctcttccaaagccaagtgggtggagataactacatagttctcaaattcggctatggcagcagaacggagttcggcaccgggaaggggataagtcttcgtgctgatcggcgtccctttgaacaaaaggccattaccgtattcaccaccctggtaagcgattgacttactaaaatagtaattcatgcctgttttatccgccaaggttttcagttggtcgactttattactgcgggtagtcatgtagtccacttcctgcaggcaaacgacatcgggttccattccgttgataacagcggctgtcctgtcataattaatcacgtcatcgttaccggcacaatgccttatattaaaggtcaacactctaaggttcccctcccctttcggataagtataggaaacttcctgtttaccgtaaggtatcatattatcgaatttagagttgtccatgtcgtcggcacaggacaagttggcaaacacggttgccaaaagacatatataagaaatcatatttttcataagaatttatatttctgaatctaattaattaaagttcaatccgtcattccaaccgggattctgtgttatcacaccattggacaaagtacgttcgctgataggaacagggtacaaataatctctgtcttcattccatttcttggtaatcagactatgacagatgatataaccactttcgccattcgacaagcgaatctgctcgccgatctctaaatataaaggtacatttccggcaggttttgttcctacgtagaaacagacatcatccgtaccgtctttatctaaatcgtaagttccgggcccgggaacatagattcccagcagatcgttctcaaatagtttaccttctttccaacgcatgatgtcgtaataacggaaaccctccattgccagttcgatggttcgttcgcgacggatttcaaggattactccctgattggctcctttcacattcggataacctgtggcggcactcatcaaatacgggtcgggttttgaatttgccagttccatatccagattagtcattcctaccctgtctctaagtaatttaatagatttattgatgtcggcttgcttcaaagtgcctagttcggcttttgcttctgcaaaattcagatacacctctgccgtgcggaacaggggaatatcgttgcacgatttattatattcatcgtagttagccgtcatcgaatattttatcaggtgatatccggtcatagtataagccaggttcggggcttctttctttgtacttccgattctcgtatatccaggggtacgaatggtttgtgccagtcgtggatcccgattctgacattcctgatcgaatgtcatcgtttcataaccggctttatccgtgaaacggcttccgtccgccatcagataagaattcacaatcttcttgttcattcccggacgtcccattgtggtggagttctcataattctgcacattatgaagcacagaaagagaagcttcatagtcacgcccgaaaatcacttcatccgcttgtagatttatggaagcgaataaatccctgtaaggtgtgctgcccgatttatagagtgtatatccgctttcgttcataaaggtttcagaagccgagacacaagcattcaggtatttttcacaatcctccagtccatgatatttgcggaaagtaccctcaaacaggcagacacgggatttcagtgccaatgccgtccaccgggtcagtacatacgcattcttcgttttcggaagattggctatcgcaaaatccaggtcctccagcattttctgcatgacaaattcacgtgagtcccgggctttatacaattcgggatcatccgagtcgagtgctttgtcataccagggaatatcgccatatctcttcaccttctcaaagtagaaataagctctgaaaaaacgggcaacaccatcgtaacggttacgggcattcacttccgtgcagttatgggaatactgcagatagaaattaatatcgcgaagtgccgtaaaattccaaccgtttccttcatcgggtatgatgcgctgtccggacatttcgagcatcaagtcggacttgacaatcaaatcggacgactcggaataaatatcgacagcggacggaaccagattgttataaaactgattcgtaaataatcgcaactcatcttcagtcttgaaatatacatccggatacaggcggtctttgggtgtcttatccaaccaatcgtcgcaagacacgaaagatatcgccaacgcgaacaaccaagatactatataaacaggtttcataattcaaatattagttagtttaaaaagttacgttcactccaaaagaataggtctttgaccagggatacaactttgcgttaccatttgccgattggatggaattttctgccgatgcttgttccggatcaatgtagtcgctctttagcggagagaaggtaaacagattctcaccactgaaatagatatgcaggcgttctatctttaccttcttcgtccatacggcgggaatcgtatagcctactgtgatattcttcactctgcaataagccagattctgcaaataacggtcgttcaccactcccaaagaacggttattgccgagggcaagataccctatcggacgtgggaaataagcatcgggattttccgggctccatacctggctcaagaaatcgcgtggaatgaacgatgaatacggacgagcgtatggtccccaaaagaatacagaattagtacccggataccagtcttgatgtcctactccctgaagatagatggagaagtcgaatccataccagtcgaaaccaccttgaatactgtatgtatagcgcggcaatgagtttccgattattttgcggtcgcccggatcatctgccgtgttcgagccggaagatattgtatggtcgccgtccaaatcaacaaatttcatatcaccggcgtgaagtcccggattcacctgcgctgtattgataacgaagttgactgctgtttggtcgacgttatagtttgccgcttcttcgtctgtcctgaaaagtccgtctactacatatccccagatatctcccaatttctgacctacataataatcactcaatatcttggaaggattatcgaatttggttatttccgatgtattatctgccaagcctacggacaggttataacggaaaggtttgtttgccagtttgaaagcatcattccaagtcagcatcaattcccagcctttggtacgcaagttggctgcattttgcttgggctcgttggctccataagcaccgggaagctttttgccggaagtttgcatacctttagtatcacgaacataggcatcggcagtcaggttcaggcggttgttcaggaatccgagatccagtcctacgttccaagtcgaaacggtttcccaggtcaggtcggcggaattcgggtcggagacacttgcataagagcctttcttctgatcgccaaagatataattcattgtaccgttggtattaatggtttggatataatcgtaatatcctacctgctgatttcctaacgaaccgtatgagagacgcaatttcacattatcaatattcttctttaaattcccgaaaaacggttcttcactgattctccatcctacggaagccgaggggaagaaaccgaaacggtgtccgcttctgaaacgtgaacttccgtcataacgtccgcttgtctcaaataggtaacgacctcctttataggagtaattaagacgataaaatgctcccaaaagcgcatattcattctgtccgccggacatagtcatcgcatctccgactgccagatttaagtcattcaagtcatcggagagcaaaccctggcgggagactttgatatctttcagacgcttggtttcataattgtaacctgccatgatttttatctgatggtcggcaatatccagcatataatcaccataaacattgaaagcctgataccaatgattggtctgtgtttccttcaactgattcacaccgcttccggtagtcagataggatatctcacccggatatttggaatatggtacatttactgttctgttcatggtctgatagttatagtgcaggtagctgtagtttgcacggacattcaggttcttcattacattgaaacttgcttcgaaagtcgtggaaaactcatatcgctggtcttcattcttatgttttccataagcaaggatagctcccatgccatccaaaacagcagaattgctcaacgaagtcagatacaccgcactgccatccggattaatgggtacaaagctcgccagtgcatgattcaccgcagtattgaagttgttattaatacccgataatcccggataagagtaactattataatggtacttcgtgttattgctgattgtcagtcgtggagtgatctttgccgagattttacttctgaaattatacaccttgtatttatcaggattctgtctgaagatacccgtttggtcaactgtatttcctgataaataatagttcaacttttcatttcccccactgacactgatattgtgctcccacatcggtctgtttttacgataaagataattataccagtcgaagttaccgtaatagacgtatgtatctcttccgtcacgttggtcggtaactacccagggacgttcgggattctccgttttatcattccggcgcaaccaaagctggcggtagtcttcttccgtatagttggtataaggctttccgttataattggtataaaacaagtcgttgatgcctgccgaataatatcccctggtttcaaaatcagtagaagtcgtctgattgctccatgaatatcttccatcatacgaaacggtagtcttgcgggcggagccttccttggtagtcacgaggataacaccataagaagcacgagccccgtaaatagcggccgaagatgcatcttttaatacggaaatggaagcgatgtcattcggattcaagcggtcgatatccccttctattccgtcaatcagcactaatggcgatgcattgccactgatagaattcacaccacggatattgatagttgccgaagctcccggatacccagacccaaaagttacattcatattgggcacagtcccttgcaacatctgtgaggctctcggcacgggtctgtcttccatcgctttactgtctactactgcaacagctcccgtcaggtttattttcttttgagtaccgtagcctaccaccaccacttcttccagcgtagccgtatcctcccggagtattactctcgaagatttctgcaagtcggagactttaatttctttcttctcaaatccaatataggacacaacgactagggcattggccggaaccgaagataatgtaaattcaccatccaaattcgtgatcgttcccatagactgtcccatcacctgtacactggcaccgattaccgggtcaccgttcacatcgaccactttccccttaacccgatgtaaaggctgcgatgggacggcagtagtattacgttctgttttctttgtgatgataatcatccggttttgtagtttatactctacatccttatccaaaacagtagcaagcacattattaacagttgcctgctgaaaggaagccgttatcttcttgttttcattaacctcgtccgttttatagataatggagtacttcgtctgccgctcaacttctttcaataccgccttcagcggctcatttttaaagacctttgtaactgtctgcgcccgtagtgactggacgcccaaacacaacagaatcaggagaaacagtctaaaaaatgagtttcttcggtcattcataattttatcaattaagttgttacaatttaaagtgatttatatttaaggatatatatattcgattgtagtatttctctgaatcgcttctataagataaaacaactcatcattcatctgcccaacccctataaaagcaaaaaagcagattatttctgcttttttgtatcgactggctttatttattcagaccactggaatatcggataaccgttcgttccttttttccaaagattcggattccaggctacgatgatattccccagttcttccgctgacttcgccactccgtgaaaagttgttcccgtggctgatgattcgtctgatgcggtaatcgttttttcattcactttgagtacaatactttcgcaggcgtaacaattctcataactgcctaatgaagcagagaccccaacaatgcgtcctacggttgacgaagcatccactccggtcaagttactccatgctgcgctgttcttgatagcaatgtcacaacttttgtcgatttgtcccaaaataccgcctacgcctcctttagttgcactgactgctccgtatgcatagcagttctcaataaatccgccgacacctactttccgtccggcaataccgcctgcttttccgccacttgccgcctgatcgctgaccgttgcatttgaataacagttctttatataactttcttgcccatcatagctatttgccaatacaccggctattccacctgccgcaccagaaccgattacttcgccggtcgtatagcagttcacaattcttcctgtcttatttccgttacctttatctttaagtccgagataaccggtaataattccaatcccctgccgagcagatgatacagaagcattcacaaagcccacattacgacaatcaccgcacaatactccgaagaaacttggataatcaccggcagaacatttgaagttcttaatgacatggctgtctccgtcaaaatctatttcataaggaaaatcaccggaaccattcaacgactgccagtcatcaatgcctgccatatcaatatcagcacctaactggaaataaactttcattcccgatttcaacacactacgcatatttctgatctgcgtagcattcattatcatataaggtttgctgtccgttccgtttcctttctcgaacaaaccgccggcaccgtctccgtcaccatcactatttccgtcatccgtttccgttttttcgaacggaacacgagtgtatgagtccaaaggattagggtcagaacacgagattgcaacagatgccatcatcaacagcatcccaaatctgcctatttgagtaatattcatacttgatttctttacaattaaacattgagttcttatcttatatatatatccttttccttatattctactttgataggtatgatttctttcagtgcatccattacatctacgattgtctctttattacgcaacgaaacacggaacttcatatcgcccaatttctccgactctaactgaatatgcacatcgtactgacgtgaaagcttcttcaccatctctcctaacgtaatgtcatcatattcaatcctgtcttccgcccacgccattgcctgacgtgcatttactttctttcctttcaactgtcttgttaccaaatccaaagaaatagattctcccggagacatccgtatctgatcttctttataattcaactctactgctccttccagcaaggtggttgttatatacgaatcgtctgaataggcagatacattaaatttcgtaccttttaccaccacatcatattcatgcgtctttactgtaaattgctttccattctgtttagtcacctcaaaatacccctctccttccagctccaccacccggtcggctgtattaaaatgattcgaatatcttaatacggaacctgcattcagccatacaactgtaccatccgaaagctgtatcttactcttatcccccaacggagcttcgcaaacaaaaaaagtctttggcgtaaacaagtaaatagcctgttgaatacccaacgtagtaccgacaatcaatgctataacggcagcgatacgggctatcttccatataccaggtttcgactttttcaataacgggacaatcgcttcctgcgtatacatcttatgcttcaaagcttcccattcggcatctgtctccgaatcggtattccggtgattcatccattctctctcccattgacggaacctgccatagccaccttccacctgttcgatatattcgaacagattcttttcgtcagctcttgatatgcgtccttcaaaatactgaatagccaattcacggatattttcttcttgcttcattatattcactttctataagatgtaacaacccatatttcttttacccaacctctgaaacaaaaaaagcagaaaaaaactttcctgcttcttattctttatataatcgaagagtgcattgattatttctgctccatcatcagccatgccaatatcactatatacagatccaccggatagcgttcgctgaaatgccgggagaaatattgcaaagcccttgctatatgcttttcgactgctgtggtagatatttgtagtttttctgcgatttctctgttcttcaatcccctgaaacggcttaacaaaaaaatctcacgcgacctgtccggcaactgattaagcacaagggcaatctgctcctgcaattccttgtataataatttatgttctgcatcctgcataaagtctgcatagtagagtctttcttccccatccacctttgccaggtactccacccggtacttttcaacaatcgagcgatgcttcagataatttagacatccattgcggaccatagaaaaaagaagagaagtaagtgagaaggcagataacatttcgcgacgttcccaaaatcgtaagaaacactcttgaataatatcacgaaccgtttcttcatcttctataaaacgaatagcataccctcgcaaacgaggataataactcttgaacagaaactcaaaagctgcattattgcctcttttcagctctcccaataattgtttatcatccatgaaatctaccatagtttagaaatttatgcgcaaaggtacgggtcaacagttaacaaagtgatgacaatattatgaatattttttcaataaatcaaatttgaggtacttttttataaaacgccaaaaaggaagttttcaataataggatacaaaaaaagggtcagtaactgacccttttttctattaattcatggtttcccacttattgcatatacaatctgtcaataagaaagttttccttattcttcatccattaggatttccagaatctgacaagcagctttcgctaccggagtacccggaccgaagatagcagctacacctgccttatacaagaaatcgtaatcttgtgcaggaataacaccaccggcaatcactacaatgtcttcgcgacccagtttcttcagttcttcaataatttgcggaaccaatgtcttatgtccggcagccagtgaagaaacacctactacatgaacgtcgttttcaacagcctcgcgagcagcttccgccggagtctggaacaacggtcccatatccacatcgaagccacagtcagcataaccggttgctacgactttagcaccacggtcgtgaccgtcctgtcccatctttgcaaccatgatacgaggttgacgcccctctttcttcgcgaacttctcggccagttcacaagcacgtttgaagtcgctatcgtttttactttctgatgaatacacgcctgatatcgttctaattattgctttataacgtcctactatctgttcgcaagcataagaaatttcacccaatgttgcgcgaacacgagctgcttccacagccaattccaacaagttacccttgccagtcttcacacattcggtaattgctgccaatgctttgtccacttcagcctgattacgtccatctttcaaacgtttcaggttttcaatctgttcaagacgaacggctgtattatcaatttcaagaatatcaatcggagcttctttttccagacgatacttgttcacaccgacaattgtctgctgaccactgtcgatacgagcctgtgtacgtgcagcagcttcttcgatacgcatctttggaatacctgtttcgatagctttcgccataccacccagtttttcaatttcctgaatatgctcccaagccttgtgtgccagttcgttcgtcagagattctacatagtaagaaccaccccatgggtcaacgttcttgcagatgtaagtttcttcctgaatgtaaatctgtgtattacgtgcaatacgtgcagaaaaatctgttggaagagcaatagcctcatccaatgcattggtatgcaaagattgagtatgccccaaagctgcagccatagcctcaatacaggtacgtcctacgttattgaacggatcctgttcggtcagtgaccagccggaagtctgcgagtgagtacgcaacgccagtgatttcgggttcttcggattgaattgtttcacaatctttgcccacaacatacgtgcagcacgcatcttggctatttccataaagtgattggttccaatcgcccagaagaaagacagacgcggtgcaaatgcatcaatatcaatgcctgctgccgttcctgcacgaagatattccaaaccatcggccaatgtataagctaactcgatatccgcggttgcgcctgcttcctgcatgtgataaccggagatagagatagagttgaacttaggcatcttctgcgaagtgtattcgaaaatatcagaaataatcttcatagagaatgcaggcggataaatataagtattacgcaccatgaattctttcagaatatcattctggatagtaccggccatttcttcgagtttagcaccttgttccagaccggcattgatatagaatgccataatcggaagtacagctccattcattgtcatagacacagacatcttgttcaatgggataccatcgaacagcactttcatattttccaatgaacagatagatacaccggctttacctacgtcacccactacacgttcgtgatcggggtcataaccgcggtgagtagctaagtcgaatgccactgacaaacctttctgaccggcagccaaattacggcgataaaatgcatttgattcttcggcggtagaaaatccggcatactggcggatggtccagggacgaagagtgtacattactgaatacggaccgcgcagataaggaggaagtccggcagcatagccaaggtgttccattccttcgaggtcttcttttgtataaacaggcttcacttcaatgtgttccggtgttttccagtcagcggagataccgttagccttttgccattcagcaccattagtcggctgaaatgcggcatatatatcgatgtttttaaaatcttttctcatcttacttcaatagtttagcgttaaactctttcaaggtatccaatacattgacacgaacatggatgaagttttcgatacctgcagctttcaggtcgtccatacaagccggagcaccggcaacgataaacatagcacgaccattcagtgctttgaaagcaggaattgcatattcagcatattcatcatcgctggaacagataacaacaatatcagcttttgcagccatagctgcctctactcctgcttctactgtctcaaatcccagattatcaattacttcataaccggcacaagccaggaagttacaagaatattgagcacgtgcctgacgcattgccaaatttccgatggttaacatgaacgctttcggacgtttgcctgatgcttctgtttcgagacgcaatgcttcaaactgactggcagcacgatcgaacaccagagtatccacctctttttcgcaagtatgagagtcacctccgcaacaacacttaccttcaacaggttgcttattgccagccttttcattgaagttcgggaattggttggtacccaacagcacttcacgacgctgtgcaactgctttatgacgagctttgttgctctcattcacagcagcctgaacagttcctgctttcaatgccgcatagaagccacctgcttcttctacagcaaggaagagttcccaagcctgttttgcaatagccacagtcagattctcgatataataagaaccggcagcagggtcgatcactttatcaaaatgagattcttctttcagcagcagttgttggttacgagccaggcgttctgagaactcgtccggagtctcataagtcttatcaaacggagttaccgtcatagagtctacgcctcctaatgcagcactcatggcttcagtctgtgtacgaagcagatttacatgtgcatcaaacaaagtaagattgaaagtagaagtttcggcatgaaccgccatttttgctgcgcaacgacattctccgttaggacctttattctcgcaatcacgcacacattcaggattgtaagaagctacaatatttgcccaaagcaaacgtgccgcacggaatttcgctatttcaaggaaataattggaactgataccaaaattaaatttgattttcttagctactatggcagcaggaataccggcatcagtcaattgacccatatattcatttccccaagccagagcataacccagttcctgagaaatataagcgcctgcattattcaatgataaagcgtttacattcagcacacgatagaaaggaagcggctgaatggcttcaatcaaagatttggctgtttgtaccatatcacctttctccttgccacgagtcagcatcttgttgaagaaatcatagttgatagaacctttcagtttcttcacatcataatctttcttctggaaataagctaccagcagattagccaactcaaccacatgcccctgacaggttgagaaattcagttcaacacactctgcctgaatatcacttaacagtgtttcaatatattccgcattaagttcttttgctttcacatggaaagaaagtgagtcaacacccttatttaggatatccagtgctttcgcattggcttctttcggacattctactctaatttcctgacgaaccaaccatgcattgttgtcttttttagttcctcttaaataagggaactctccaggaagtgcatcagtagtttttaaatcctccagatcttccatccggtaaaaaggtttcactttaaacccttcgtttgttttccaaacgagcttcttctcaaaatcagcaccttttaaatcggctgtaaccttctccatccattgttcggtggaggcaggagaaaagtctgagaagagtttttcttttttgtctgccatagtttatttaaaattaaaacaagattaatattgtctttatttttatctatctctttctaaatgtcagtcgttcgacctgcaaatataaccaataagttaaaacgaatctcttttttagggaaaattcgcacaggacgccccgattcgtcaagtgcatacaatctgcatagaaattcttcatttttagttcttcttttatttgattagctccaatgttatgagtaattttgcactcgtttttagaaaaacattataaaaactgctatattatggattggttacaaagtttattatgggaccccagctccgtagctcacatcgtgctcctctacgcatttgtagtggctgccggcgtgtatcttggtaagataaagatattcggagtttctttgggcgtcacatttgttttgtttgccggcatcctaatgggacatttcggcttcacagccgatacacacatcctacatttcatccgtgaattcggattgatcttgttcgtattctgtatcggtcttcaggtggggccatctttcttctcctctttcaaaaaaggaggaatgacattaaacctgttggctgtaggcatcgtagtgttaaatattgctgtcgcactggggctttattacctctggaacggccgggtagaactgccgatgatggtaggtatcctttacggagcagtgacaaatactccgggacttggtgctgccaatgaggctctgaatcagttgcattataccggtccgcagattgctctcggttatgcatgtgcttatcccctcggtgtggtaggtatcattggttctatcattgccatccgttacatcttccgtgtcaatatggcgaaagaagaagaaagcctgaaaatccaaagtggagattcacaccacaaacctcacatgatgagcctggaagttcgcaatgaatcaattagtggaaaaacgctgattgaaatcaagaatttcctgggccgtaagttcgtttgctcccgaattcgccatgatggtcatgtaagtattcccgaccatgaaacagtgtttaatataggcgaccagttatttatcgtctgctcggaagaagacgctcctgcaattgtagtatttatcggaaaagaagtggagctcgactgggaaaaacaagacctcccaatggtttcccgtcgtattctggttaccaaaccggaaatcaatggtaaaacattaggttctatgcacttccgtagtatgtatggggtcaatgtcactcgtatcaaccgttccggtatggacctgtttgccgatccgaatctgatacttcaggtaggtgaccgcgttatggtggtaggacagcaagatgcagtggaacgtgttgccggtgtactgggtaatcagttaaaacgcttggatacaccgaacattgttacgatcttcgttggtatcttcttaggtatccttctgggtagtcttccgattgcattcccaggtatgccgactcctttaaaattaggtttggcaggcggaccgctggtagtggcaattcttatcggccgtttcggtcataagctgcatttagtgacttatacaaccatgagtgccaacctgatgcttcgtgaaatcggtatcgttctcttccttgccagtgtcggtatagatgccggtgccaatttcgtgcaaacggtagtcgagggagacggattactatacgtaggttccggtttccttatcaccgttatcccgctatttatcatcggcaccatcgcaagattatattataaggtaaactacttcaccctgatgggattgatagccggtagtaataccgacccaccggcattggcttatgccaatcaaacaacctccggagatgctccggcagtgggatactctacagtttatccgttatcaatgttcctccgtattctgacgggacagatgatattattagcaatgatgtaaatcaagtttagcatataaacaataaagccggctatatccaaatggaatacgccggctttatttattttttcaatctgcttttctatcctgtcatacaagctgcagtttctttactacaaattcttcaatgaaccgcactgtctcttcaattcccaaagaagaagaatcgatgcacaaatgataagtagctgctgctccccacgttttatagctataataattatagtattccgaacgtctcttatccgctttttcgatcatttcttctgcagcttccgcatcaatatgatgcatgccacacaaccgcgctatgcgatcttctttagaggctgaaataaaaacattagcacaacgaggatgctctcgcagaatataatctgcgcaacgtcctacaaagacacaagatctttctgctgccagatgacggatcacatcactctgtactttgaacaaagcatcattgctcaagcagttgttacatggcatagctccctcactgataaaagggaaacgcataccgaacagtccgccaataataccctgcgaggctttttcatcagccttttcaaaaaactccttacacaatccactttcctccgaagccagattaatcagttccttgtcgtagaagttgattcccaaacgggctgccaacttctctcctatttcttttccgccgctacctaactgacggccgatattgataacataattaccgctcatagtacattttgttttatggttctgtagcaaacatacgacttttttctaaaaatcacatcatcaaacgaaagttatatttgaaagtgactatgaaatatccttttatttcctggttacggaactcataaaaaccatcagaagaagtcgtacggccgaaacttttcctcttcccgagaatatccgcccaataagcagacagttccgcttctttctttttcaagaaccgccagctggcacttgcattccacaacatctggtcatcttcgcctttacggatattcgtaccattacggaaagaataagctccgtcagtccgtaattgcaagccaaaaggaagatcaacgtacccctcaagacgaaaactataattacgcgtataggtatcgttatcattgatagaattaagcgaatactgataattccaggaagtagagaaatcaatacctccccaggtgggctgataagatacattcgcgtcacaccccaatccggtatcacgtgtcgtacttttcttcggttcgaggctcttgtcttcattaatcatactgacacgattgctatgattaccgttcatatccaaccgcaaggaaaaatgtcccagacgcttccaccagttggcacttccatatacattccagtttccgttaatattaataggagatgtctcacgtccgccggtttttgcatcatatagcactacctgcgtcacactgttctgttccatctgcccgccgatattcgcagatatacctttttttgaatgttgaaagctcacacggacactatgagaaaacatctgtttcaaatccggatttccccgggtgatatacaacggattactgttatccgtcagcggcattaaatctgataaggagggttgccgggttctaccgctataattgaaagtgatccgggcctctttctttttccaattcacccatatcataggctgaaagtcgatagtatgcatggtagtgtccgcatagagctttcccattttccgttcaatggcacgtttttgcggagtcatccctaatgaggcattaaacatccaggtatcatcagagtaattaagccccacatccagattatgaccattcgtacgactatgactccgattactcaaactatccacataccctgcttcatagtcgggaggtagttcaccaaagacttccgacttcgtcagagaagataattcatacgtatcacgattatcacgctcatagttagtatcccagttatatgctacccggaaatgcatcttcttaccaataggctgggcaaaggtaatcccgactctccatgaattatttttttgaggcgacttcaaatactggttacgaaaaagcaccgaatcatttcccaatttatcttcaagacggaaataagtagttttagaaagcgaaaaactttcattatctccccacgaatccgagttcaggatattcaatgccagcgttgtacctttttcattcagacgtctcataatactcatcatccagctataacggttcgactgattctccgaacgcgaccggttctcactacgattcacttttatatcccggggaatagattcaaagtcatcaaacaagctctcatgatttatgccgggaggagcatcaaaggatgcattctggctactgttttcattcctattaggagagattcctaaattaccggtaaaatgtatacgtgtacgtttatctacttcccagcttcctatgaagttagaactaatcgaccgccccttagagttactttcgttagtagacgcagagtattgattacctgccggtaaatactgttcctgataaatggaagaaagatttccgttccggttcagattatagttcacacttccggtcagggagaatttcttaccgaatttatgagtcatattcattcctaccgaattgttgatattatccttgtacgtactattctggtatctgttggtagactgtgcgataaaagaaagattatctccgtctttactaaaataattcacttgcccctcgaaatccttcttctggttattcccgtatcctaccgttgcatttgtcagccaggttttattcaattcatccttagtctgcaagtcgagtacatatttcttttctcctgaactaattccggtgaactcctcttctttcgatttcttatcatatactttcaacttactaatcaagtctgccggaagattttcgagtgccgtctttttatctccggagaaaaaagcttcgccatttacattgatttcactgatgggctgtccgttgtatgtcaacgaattatctttcttattatataccaatccgggaacacgcttcactaaatcttccagataagctccttcacgagttttaaaagcggcagcattgataaccgtagtatctccctccatcactacttcctgcaattttcccgttatcgtcacttcactaatctgaatatcatcatctttcaataccactgtaccgatattcaccgatacagagtcttccagtgcccggtatacagattgcattcccataaaagagaccttcaacaggtatttctttttcttctgcggttgataattaagaatgaaacgcccattcttatcacttgttattcccttgataaaggcagaatcgcttttcgccaaaataacaatgctggcagatggtaatgcccgcttctcattactgccggcttccactgtctgcactcttcctcgcacagttctcacttgttgagcatacagagcagtatgtccccaaagtagcagcaaaagcaatcccactaacttacaagcgttcatatccaatagtagttaagtctgatatttatgttgatctaaaacaaatcgggacaaagttaataacttttacgtaaaacggttaatcccggagttattttttatacctttgtccatccattattcaatcagcaacttaatgaaaaggattatactaatcacaggaggacaacgatccggtaaaagttcgttcgcggaaaataaagcgcatgaacttactacgtcaccggtttacttggccactgccaggatatgggacgaagaattcagaaaaagggtagaacgccatcaaaagaaccgcggtcctgaatggataaatatagaagaagaaaaagaattgagccgtcacaatgtagcgggcagagtcgtagtgatagattgtgtaactctttggtgcactaacttctttatggagtttgattctaacgttgcctcctcattggaagccgtcaaaaaagaattcgacaaatttacccagcaggatgccactttcatatttgtaactaatgagattggttgggggggagtttccgagaacaaactgcaacgtaaattcacagacttgcaaggttggaccaatcaatacatcgcatcgcatgccgacgatgtatatctcatggcaagtggtattcccgtaaaaataaaataaacatgaaaacatttcatattcaaaagccggatgaagctatcaaagaagctctgattgacaaaatcaataatctgaccaagcctaaaggatcgcttggaagactggaaaaaattgctttgcaaatcggactgatccaacaatccctttctccacgattaactcatcctcaaaatataatctttgccgcggatcatggcatcgtagaagaaaaagtcagcccatctcctaaagaagtaacctggcaacaaatcagcaactttcttcatgggggagcagggatcaatttcctgtgccgacagcacggtttcactcttaaaattgtagacgcaggagtcgattatgatttaccttatgaaaaaggtatcattaacatgaaagtcggaagaggaacacgcaatttccttcatgaagcagccatgacacctgaagagatggaactttgcctggagcatggtgcccaatgtgtagacacttctcaccaggaaggctgcaatatcattagcttcggtgaaatgggaatcggaaatacttcgtcctcttctctatggatgacttgcttcaccggaatcccattagatcaatgtgtaggtgcaggaagcggactcaatcaccagggaataaaccacaaatacgaagttctgaaaagatctctcgaacaatatccgggagagcattccgcagaagaaatcctctgccgtttcggaggttacgaaatggtaatggccgtaggagcaatgctcaaagctgcagaactgggaatggttattttaattgatggatttataatgaccaattgtattcttgccgcttcacgcctttatccggaagtgatgagctacgccatattcggtcatcagggagacgagagcggacataagctattattggattatctcggagcacgtcccctactcaatctcggattaagacttggagaaggaagcggttccgtttgtgcctatcccattgtggattccgctgtgaaaatgctgaatgaaatggattcatttgctcatgcttccatcactaaatatttctaaaatgaaccagatacttgccgccctcatattctttacacgattgcctttctggaaaataaaagaagttccgcaggagtgtttcaaacacgttgtcaattattggagtttcagtggctggctgaccgggggaatgatggcattgattttctggggagccagtactattctacctcacggagtagccgtaatcctggcactgacttcacgtttacttatcacaggagcattgcatgaggatggattggccgatttcttcgatggattcggaggtgggacgaacagagaaagcacattacgcatcatgaaagattcccatatcggaagctatggagttttgggattaatcatctattatttatttgcttacaatctactggtcgcacttcccttagcagttactcctttcttattactaagcggagatacctggagtaaattcatttcttccaatatcatcaattacctgccctatgcacggaaagaagaagatagcaaatccggaacagtatatacaagaatgagttttggagagatcgtaatgtctgcgatgggtggaatactacctctcctattacttcctccaagctactggcccgtatgtatatttcccattctggtattcttctttatctgccggatgatgaaacgacgtctgaacggatataccggagattgttgcggtgcattatttctcttaagcgaaatgagtttctggctgggagcagtgatgtctatctatataaaataagtaaacctatgaatatttatctaatcagacatacctctgtcgacgttcctaaaggtctttgttacggtcagtcagacgacgttcctttacgtcctacatttgagatagaagcagccgtaaccaaagctaaaatcgaatccattcactttgatatggcttacaccagtcctctatccagatgcacccgtctggcacagtattgcggattcggagataccatccgtgacccaagaatactggaacttaatttcggagattgggaaatgcagtattttaataaaatcaaagacccgaatctccaatgctggtatgacgactacatgaatgtaaaagcaaccaatggagaatcgtttgccgaccaatatagacgagtagccgcatttttagacgaaatcaaacaaaaggaggctgaaaatatagtagtatttgctcatggcggcgtattgatttgcgcacagatttatgcaaagttgattcaccaggaagaagcatttcaggcagtacctgcctacggaggagtttttctatatcaagagtgcccgtaaacaaacaggtgtagatatctctaataagtttgcgatgtctttaccctcacaccctgtttaataattacttactggagaattttcggttgacggcagttccactttatttcattacttgggacaaagtgtttcgcaccgagaaacgaaatgtttcaagtaatgaaacgaagtgtttcacaccgagaaacaaaatgtttcgctacttgaaactaagtgtttacctatatgaacaagccattatctgcatagattctgcaaataactacatactttcgatggatttactatatccttataaacttcaggtttaacctatcaaccaaatcaagacgagacagggtgagagtaactgtttaccctcaccctactctcactcttaccctcacacctgtaactatgatgaataagcggtttgagtcaatgggtgagagtgcgagggtaaaaagcatctccaaactttttctgaatctttaaggtgcagaaattctctgaagtaatcagcagaccgataaacttaatccattctgcctgcctaaggggaggatacataaataggaatgatttcggagaaaatgcaataaaaaaagaaagaatatctccaaagatacttatctttgccccgcaatgtcaatcttcagacaccgaaaattatttattcatttaaaagatacacgaataaagatgaaatctcctatttcaatcctcacatggctatgtcttctcttcctggctagttgtatatccaacaagaagacttctctcgaggctttcaaacaggatgtctatacacctgaatacgcaaccggattcaagattctgggtgcggacaataccgccagcacacttattcaggtttccaacccatggcagggagccaaggacgtgaaaatgtcttatttcatttcccgcaacggtgaacaagcgcctgccggatttaccggtcctacgattcctgccggagcaaaacgtatcgtatgtatggcttcttcctacatcgccatgttcgacgctctaggtcaagtggacaaaattgtcggagtatcgggcatcgactatgtatccaatccatatattctcgcacataaaaattctatcaaggacatgggccccgaaatgaattatgagttattattgggactgaaaccggatgttgtcctgttatacggtatcggagatgcgcaaactgccgtaacagacaaactgaaagaactgtatataccttatatgtatgtaggagaatatttggaggaatcgccgcttggtaaagccgaatggctggtagctcttgccgaattaacagacagcagggaaaaaggcatcgaaatattccgtgaaatccctaaacgttatcaagttttgaaagcgctcaccgaatcggtagaacaacgtcctaccgttatgctcaataccccgtggaacgacagttgggtgatgccttccacacaaagttacatggcacaattggtaactgatgcgggtgcggattacatctaccaagaaaacaagtctaacagttccactcccatcggactggaaacagcttacaaactgatacaaaaggccgactactggattaatgtaggcatggcttctacgttggatgaactaaagacggtcaatcctaaatttgtagacgccaaagctgtacgcgaaaaaaccgtttacaacaataatttacgaacaacaccgacaggaggtaatgactactgggaatctgcagtggtacgtcccgacgtcgtattgcgtgacctgattcatatctttcaccccgaactcgtatccgattcactttactattacagacatctggaatgaaacagcctgataaacgcactccctttttattcattacactgggtatagttgccatactgttattactgatagacatggcaacgggagatacatatattcctatcaccaaggtatgggctgtactcaccggaggcgaatgtgacgaaatgacacggaatattctcctttctatccgtttcatacgggtagtggtagcggctttaataggaatagcactctccgttagcggtttacagatgcaaacagtattccagaatccattagcagacccttacctgttgggagtaagttccggtgcaggactgggcgtagctctgttcatactaggtgctccattacttggatgggcggagtttccaattcttcagtcgctgggtatcgttggctcgggctgggtaggaactgccgtaatcttattgggagtagccattatcagccggaaagtaaaaaacattctcggtgtattgattatgggagttatgataggctacgtagcaggcgctatcattcagatactccaatacctaagttctgccgaacaactgaaaatgttcacactctggtcaatgggatctcttagccacatcacagtcacccaactgggaattatgataccgatgttatgtatcggtttactaatttccgtagcctgtatcaaatcgctgaacctgttactgctcggtgaaaattatgcacgaacgatgggaatgaacattaaacgttcacgcacgttcatcttcgtttctaccgcactgctgacaggaacggtcaccgctttctgtggtccggtaggatttatcggcctggcagtaccgcatgtcacacgactgctattcaacaatgccgaccaccggatactggtccccggcaccatgctgacagggcttatcagcatgcttctctgcgacatcatcgccaagaagttcctacttccggttaactgcatcaccgccttactaggtgttccggttattttatgggtaattgctaaaaacttgcgtagattcaaatgatagaacttaaagaactgacattaggatatggacagcgcacgctgttggaaacggtaaatgcccgaatcacaggcggacaactcgttgccctgttaggacgtaacggaacgggaaagagcaccctgctccgtgctatgatggggctggaaaagcctcaatcaggagagattactctgcaaggaaaaaacatagcatcattgaaaccggaaaaattagcccggaatataagctttgtcaccaccgataaagtacgtatcgctaatctccgctgtaaagatgtagtagccttagggcgtgctccctataccaactggatcggccaactgcaaccggaagaccaaaagcgggtggatgacgctatgcagctagtcggtatgtccggttatgcagaaaagacaatggataaaatgtccgatggcgaatgtcagcgaatcatgattgcccgtgctcttgcacaggatactcccgtcatcctgcttgatgaaccgaccgccttcctggacttacctaaccgctacgagctctgtttgcttttaaagaaactggcacaggaagaaaaaaaatgtgtcttattctccactcatgacctcgacatcgccttatcgctttgcgactccatcatgctcatagataatccgcagatgtacacgctgcctactccggaaatggtggctagcggacatatagaaagacttttccgaaatgaatccgtcacgtttgatgtgcaggagatgagagtacgcatcaaataaacaaacagatatccgacaagaatcagactgtgtataaaataaataggtagcattcatttgggttcctatataaattcgctatctttgccccgaattggtttcagatagccatatcaactatctgaattaaaagggaatcgggtgtaaatcccggacagtcccgctgctgtgaaactccattcaacttcttgatatttacttttaccactgaccaggtatcgatagtcaaggtcgggaaggcatcaggaagggagtcagtcagaagacctgccattcatacctttatagttgtttttactcgtgggataggaaaacggcagactgtaaaaaaagaatcgagtagtcatgacatcggaaatgattgaaggaggataaattctctctagctaaaatatcaaaaggacggcattagaccgtcatgctcaatgtgtgcgtatccccgcagaagtgatttctccggggttacttttagctaaactaaatatcatcatataataatcacaatggaagttctaagaaatttatttgaaggttaccccaatctttggggcggcggagtggcacactccgtactgattctgtcactaaccatagcgtttggaatcatccttgcaaaaatcaaagtgcggggagtatctctgggagttacctggatactctttgtcggaatcgtattcggccatttcaacatgaatctggacgaacacctgctccactttctaaaagaattcggattgattctgtttgtttactcaattggtttgcaggtaggacccggctttttttcagcattcaaaaaggggggctttaccctgaatatgctagctatgctcgtagtagtattaggagtaaccattactattatcctgcacttcaccaccggaactccgattaccacaatggtaggtattttgtccggagccgtcaccaatactccgggactgggagccgcacaacaggccaacagtgatttgaatggcatagatgctcccgaaattgctttaggatatgcagtcagctatccgctgggtgtagtaggtatcatcctttccctgcttgctttgaaatatctccttcgcatcaatactgctcaagaagaaaaagaagcagaagtcggtctgggacatctccaggaacttaccgtacgccctatctccattgaagtgagaaacgaatcggtagacggcatcaggattaaagaactccgcccgttactgaaccgtaagtttgtcatttcccgcatcaaacaccgcgagggtggagaaaccgaattggtcaattccgaaacaattctacatgtaggggatatcatattagtgatctctaccccgattgacgtggaagcaatcactatattcttcggaaaggaaatcaaaatggaatgggaacaactgaacaaagagctcatttcacgccgtatcctgattactaaaccggaattgaacgggaaaacgctttcacaactcaaaatcagaaataacttcggagcaaacatcacccgcgtcaatcgttcgggagtagacttggtagcctctccacaattacagttacaaatgggagaccgtgtcaccattgtaggttccgaactggctgttgcccatgcagagaaagtacttggcaactccatgaaacgcttaaatcatccgaacctgattcctatctttataggtatcgctttaggatgtattctgggaagtcttcctttcgcatttcccggaattccgcaacctgtgaaactaggattggcaggcggtccgctcatcgtttctatcctgattagccgtttcggtccgaaatacaagctgattacttataccaccatgagtgccaacctgatgcttcgtgaaatcggtatttccatcttcctcgcttgcgtaggtttaggagcaggcgaaggctttgtagacacagtcattcatggcggaggatatatatgggtaggctacggagtaatcataaccatcctgccacttctgattacgggattgataggacggtattattgcaagctgaattatttcacgcttatcggagttctggctggttctaccaccaatccgccggcattggcttactccaatgacctgacctcctgtgatgcgcctgccgtcggctacgctacggtgtatccgctcaccatgtttctgcgagtattgacggcacaaatattgattctgtcgttgggataacatattaatatatccttttccatccaattgattactaacaaatggagagaataggatcagatgccggaatatttgttattggtcaatgggatatttttttagaataaaacaaactaattaataaaaactttctaactttgtgccgttaaggtttccttgaacaacttttgcgttgtaaaggaatgaaaagggaatgccgtgtaaaccggcaacagtacctgctgctgtaaatctccgctccttgtaatcaaagagcaaaattgcaacacaaaagtcactggatagtttatctgggaaggcgttgcaaaatgggatgagtcagaagacctgccttgatgctctgatttacacctgcgggatttcgggtagtagtcaaatagaaaataagcaattatcttttatttggtataatagctatatgtccgtttgtgtagattgaattcagatctgaacaaacggattttttatacctataaaataaaagacatgctttctattcaagtccattcatacaataagcattatatccatttacggtggatattatgtttgattctatctctatttaccacattaccggccatttcccagtccagggttcggcatcagacttctctgtctgatacacttctcaaactcaaagaagttactatctacagcaaccggatgcaaaaaaagatgtctcctgtacagattctgtccggcaaagaacttgagaagctcaatgtttactccgttgctgatgctttgcgctacttttccggagtacagataaaagattacggaggtattggaggactaaaaaccgtcaatatacgaagtatgggcagtcatcatgtcggagtattttacgatggtattgaattaggaaatgcgcaaaatggagtcgtcgatctaggccgtttttcattagataatatggaagtcatttcactatataatggtcaaaaaagtgccatcttccaacctgccaaagattatagttccgcaagtgccatatatatgcagacacgaaaacccctattcaaaggggaaaagaaaaacaatctgaacatcggggtgaaaggcggttcattctctaccatcaatccgtcactactttgggaacatcgtttcaacgaacgaataagcagttccatcagtacggagtatatgtatacatcaggacgatataaattcacatacgccaagaaagatggttacgacacaacagctgttcgtcaaaatggagacgtaagaatgttacgtttggagaatgcattcttcggaaaagtccccaaaggagaatggaaagccaaagcatacctatacaattcggaacggggataccccggagctgcggtaagagaagaaccgggtaagtttcgccatcaggaccggcagtgggataccaatctgtttgtgcaaggctcttttcaaaactattttaagccttggtacagtctgctagccaacggaaaatatgcttatgactatctccactatttatccgatcccagactggatgtcaccaccatgtacgtagacaatcactaccgacagcaagaaatctatgcttcggccgcccatttattcaccatctatccctggtggagaatgtcattatccaacgattttcaatggaatgcattacgggccgatctcatagattttgtctatccaacccgtaatacaatcctgacttctgctgccacgtcctttgacttcaaccgcctcatgttgcaggcgagcctgttatatactcatatcgatgacaatacacgtaccaaaggagccaatgcaggcaccaaaaacaaatacactccgtctgtcatagccacctggcaaccattgaccaagctccctctgaatgtacgggccttttataagaaagtctttcgcatgccaactctcaatgatttgtattatacttttataggcaataaggacttaaaaccagaatataccacccaatacgatgtgggtatcactttctctcacacctggaataaccattggctgaaaagcctggacttacaaatagatggttactataatgaagtagatgataaaatcattgccatgcctacctccaaccagttccgttggactatgattaatctcggacatgtggaaattcggggattagacgcagccatacgaggagaatggggcttcggaaaggtggaacttagcactctcttcaattacacctatcaaaaggcacaggattttaccgatcctaccagtgaatggtatggaggccagattccttatataccttggcatggaggttccatcatcctcaatggaagttaccaaacatggtcctgtaactatagtttcatttatacaggtgaacgttatgaagcagtcgccaatatcccggagaactacgcacagccctggtatacccacgatttttccctatccaaaacttttcaatgggggaaaacgggaatacgtgtaacggcagaaattaataatatcttcaatcagcaatatgaagtagtgcaatgctatcctatgcccggtacaagttttaaaatcaaattaaacgtcatgttatgagaatatctgttctatccatcattatctgttttgttcttctatcgacttcttgtcgcgaagatgaacgcattattccgtcaactcccaaccaagttactcccggagtaagcggtacctctgtcaaaggtttctttctactcaatgaaggaaatatgggaagcaacaaggctacccttgattactttgattacgaaaccggtatctatcataagaatatctatgcggaacggaacccgggagtcgtacaagaattgggggatgtgggaaatgatatccaaatctatggaaataagttatatgccatcatcaactgttctcatttcgtagaagtgatgaatgtagaaacagcaaaacacatcacgcaaatttccatacctaattgccgttatatcgtctttaaagataaatatgcatacgtcagttcgtatgcaggccctgtcaaaatagatcccaacgccagactggggtatgtagcacgtgttgacactaccacactgactgtcaaagatacctgtgtggtcggctaccagccggaagaaatggtgattgtgggcaacaaactctatgtagccaactccggcgggtatcgcgtacctaattatgaccgcacggtatccgtcatcgacttgaacacattcaaagttatcaaaaccattgatgtgggaatcaatttgcatagaatggaattagaccaatacggaaatatttatgtctcatcccggggagattattatgacacttactccgaaacatttgtaatagattccaataccgataaagtaatcgaagaattaccgcttcttcccaatacagaaatggctatttgcagagattcactgtatgtatacagtacagaatggagttattacaccaacagttggacagtctcttacgccatctataatacaaaaacaaagaaaactgatacccgcaattttattacagatggtacggaaaaatctatcaagataccttatggaatagcaatcaatccggaaacaggtgaattcttcgtcaccgatgccaaagactatgtgactcccggcacattatactgtttctcccgggatggaaaaaagaaatggtcagtcatcacgggggacattccggcacatattgcctttacagataagaaactaaaagagattcaataattcacaattctattaataattaaaaacaaaagcaatgaagaaaattctatttttactgctcactgtcgttacagtatgcagttgctacaatgacgatgatctctgggataaagtcaatgatctcgacggacgagtagaaacactagaaacaacagtcaagaaaatgaactctgaaattacaactttacagagtttggtagacgcattaaatcaagggaaagtaatcaccaacacggaacagacatctgatggctacacattaactttcagtgatggaagcaccgtatctatcaaaaatggaaagaatggtacagatgctcctgtgattggagtgaaagctgacgaagacggaatatattactggaccattactaccaacggtactacagaatggctgccggatgcaactaacaagttaaaagtgacaggtacaactccagttatgggagttgacagtgacggatactggaccgttgatacaggcgaaggagccaaacgtattaacggaacagacggaaaacctgtgaaagcggaaggacaagacggagactctttcttcaaatctgttacagttaatgacaatcatgtactagttactcttgcagatggaacgtcgttcacattgcccaaaggggaaacatatacatttgacattgccaatagggattataccttgttctcgtctaatgaaacaaggacgtatcttcttacaactgccaatatagacgacgcaacattaattgctattccgcaaggatggacagcggttcttaatgataaagacttaagaatcacagctccggcagtttcaggtgatgatgtcaaagatggtgaacttaaaatacttgtcactccgtccaaagctttcggtaaagtaataaaaatgcaattaagagcagtgcgtgaagcacacttcttgacattcgaggatgttgattataaaggtgatgctaacatggtaggagaaagaaactggtcatcattaattgacagccaacaatatggtggcccactactttatcctaagaataaccaactctataactggagtgatgcaaacaacacttttcttgcttccgaacttcctaacggatggggtgattaccaatactggggtggcggacacgcaatttccaattatctggatatggatcttactcatggagacttccagcaccaactagccgtttattatcaggatgcaaaaactggttttggaggacataatggttccaaaaacttctgcgtacattacggctatgcagacaattccggatatgccaacggtccattaccctatatttactttggagacggagttgctcgtgtagttgaccatatgtatgtgactatgacgacctacctagccaactgtgtggccaacggtaacggtttgaccgcacccgcaggcaaagatgattgggtgaaactggttgctatcggttatgatgaagatggaaaagaagtagctacacgtccggaattttatttggttggagccgagggtaatatacttgaatggacaaaatgggatttatccgcattaggcaaagtggtcaaaatagactttaatgtcactggaagtaatgataacggatatggtttcagccaacctgcctattttgcttatgatgatgtagcagtgagattctaatgaaacatattatactttttttatttgttctgttagcattaatatcatgcgtgaaagaagaggaggactctcctcttctttccgctcctgtcattaccttgaaagaagaatcccccatctataaaacaaaaattggtcgggagataaccatcgctcctgtttatgaaaataccgattcggaaacgacctttaactggacaatagatggaaagagtatctgtaccacttccaccctgacattttcagccgatgaagcaggcaggtatttcattctgatttctgccaccaatgccggagggacaacagaaaaggagatacgtatcgatgtctttcaacttgatgtaccgactatctctattgcggatgccgacaaaggtttcaaagtgcttcaaggctctgaactaaccattacacctatagtagattcttttctggaaaccagttactcctggcaaataaacggtgaagatatttcgaacgaattaacctgtactctccccacaatcgagcttggcgaatatcaagttcgttttgctactcacaatgaagatggcgatgacgaagtaactttcaaagtagaagtttgttcaccggatcaagtagatttcaactggacattcctgcaaacggaatataacatgtcagccggcagaactatccgtatcaaaccggttgacgtgaataatgcactggatgcagtctatacatggaccgtggacaatgaacaagtgcaatccggagaaaatgatacttatctgtttacatccgagcagcagggagaacacacggtaaaggtcgaaatgaagaactcatatatactcgctacgcaaacattaaaagtcaatgtttgccctcccgcaggaacataccagcggaagattagcgccacaagttctgcgtcaatgaacaaagtatatgaatatttaccggctcccggtcaattcatcaatgagaatcataacacaacaactatggcagaagcctgcacctatgcagaagaacgaatcaatcagacggcttatgtttccctaggcggattcggtggatacatcatcgttggattcgatcatagtatcgtgaatgatggagattacaacattgctattacaggaaacgcttttgatggttcgtcagaaccgggaattgtatgggtaatgcaggacgaaaatggtgatgggttacctaatgacacttggtatgaattgcgcggatccgaatatgggaaagccgaaacctggcaggactatgccgtcacctatcataaaccaactggtattcagcttcccaccccatggacagacaatcatggtcaaagtgggtctattgattatctgggtgcttttcaccggcaagattattattatcccgcctgggtaaaggaaaaacaatatactttgcgaggtactcgcctgaaagagcgtaattacgatcaatccggtaatggtacttattgggtaaatgatagttatgaatggggatatgctgataatttcagcgccattgatcgtctgacagatgatgacaactataatgccggaccgtctgacaatcatttcaagatatcccatgctgtaactttcgacggtaaggatgcaaacctgaagtacgttgattttatcaaagtacaagtgggtgttaatagtaaaagcggttggttgggtgaaatatccactgaagtttttggaataaaggatttcaacatgctcaaataattgatagaatatacataagagattcttttccctattaaatatagagataaaaattaccatttggtaatttttatctcctcccataaccctacctttgtcgccattttcaacgacaaaggtagaaagttatgaaagatagtattgatttcggcagtatgaacatctccacgttgttccgtaagttactaattcctacggtacttgggatggtattctcggctctgttcgttattacggacgggatatttgtaggaaaaggaattggcagtgacgcgctggcggcagtaaatatcactgcaccgctttttatgatcgcagcgggtatcggactgatgttcggagtgggagcttcggtggtggcttccattcatttatctcagggaaaacgcaaagtagcaagtattaatatcactcaggcaattgctttttccacattgctcatacttatcctgtctgctctgtgcctttattttatagagccattagccagattattaggtagttcggaccgattgttgccgttagctgtagaatatatggcatggtacattccttttctcgtattctacgaagtcttaaatataggtatgttctgcatccgtctggacggttcacccacctatgccatgatgtgtaatgcggttgcagccatactcaatatcatactggattatatattcatcttcgaacttggttggggaataatgggagcagcttttgccaccagtctgggaactgtcgtgggagggttgatgacactgatttacttactccgtttctctcgtaccctccatctatgccggataaagttaagtatcaaaagtctgttactgactcttcgcaacatcggttatatgattaaactgggaagttctgcttttatcagtgaagcctccattgcctgtatgatgtttctggggaactacgttttcatccgccatctcggtgaagacggagtggcagcattcagtattgcctgttacttcttccctatcatcttcatggtctataatgccattgcacaatccgcacagccgattatcagctataacttcggagccggacaacccgagcgtgtacgaaagacactgcatctcgccattcggaccgctttaatctgcggtatcagctttttcattcttaccgcactatgctgtcaggacattgtttcgttattcattgaccgcagctacgctgcatttgatatagcagtaaacgggcttccttatttcgaagtaggattcattttctttgccgtcaacatgattggcattggttattatcagagtgtcgaaagaggtcagcgggcaacaattatcactcttctccggggagtcgtatttatgttgatcggattctttgcgctccctccggtattgggtataccgggtatctggctagccgtaccattggcagagttattaaccactttctatattttcggaatttatttgaaagatcgtttcattgtctgccgacgataagtatctttgcaatatgagaacattcattgaaaaactttgcgatagatacaaggtatcagaaaccgatgtacagtctctactgaactgtatggaagaggtacatttcaaaaagagagatttaatagtacgcgaggggacaaagaactgtaatctttattttatcaagacaggaatattgcgagcctattatcataaagacggagtggatactaccatctggtttgcttcagacggagaagctgctttctccgtctggggctatgtagataatgcctactcattaataaatattgaggtcatgtgtgacagtgtggcctattgtatttcccgaacagctctgaatcagctattcgcctcatccatcggactcgctaatttggggctccgcctcatggatcatcagtttcttcaacaggagaactggcttatcagctcgggaagcccacgggctaaagaacgctatctcaaccttatcaaagagactccggaattattgcaatatgtacctttaaaacatattgcgtcttacttgtggataactccgcagtcgctaagtaggattcgggcgaagatagcatcttcttctctttaatagacgcctctaaaagaagtggttctgtcaacatgatttagttataacagaaccactactcggcattattccaatcacttaatagagaaataacaactgttttatttcaattataaatctgagtccggagccaaatatttaagttttccccacgatttattgggttcattgcctaaccatagctcaagctttcctcctttcgtaaagtctgcatgattaaattgtgcataattccattccataccgttcaattgcgcacgttggatataacaattttcagcagaattattgtgggtagttatagtaaatgtacttccttcataataatccccattcagtttgattgtgatcttatcaaaaataggtgaagtaatatcgtagtatggagtatcagattccgtacctgttacactaaatagtccaagtgccatcaatgtactgacccctcccatttgaccttcatcttcatcatgaccaccgtaccctttatctggagtaattcctccatacgcacgttcttttacctgacgtacccaatattgtgtcaaccaaggttttccaccataagcaaagatgtgtgcattagaacatccgggctgattagcataacttacgtatcctccactgtaagcataaacaaaatctaaatctcttgcctgctcaaatgcgaaatttaatttctcgcaaaacttatctgctcctcccatcatctttaccagcttaggcagttcatgagacaaagaccatgtggcctgccaggaattcgcttccacccaaccgtttccactcaatgcatcctgatgcagccattcaccatttctctttttcggaaataccaagcccagttccgcattgaataaaggagtccatgctcgtgagcgtttttcaaacatacgtgcatccgagtgttttcccaaccttgcagccatccggcttgctccccaatcttgaaatgcccattccagagttttacttgcattgtccggacaataaccatgactgatataaaactttaaatcatcagcactctcatagctcatcattccgccaggcatatgattacgttttatgacatcaaatgtatgcaaaggatcggcttttttcataattcctttcatatatgtacttaccagcaagctggtagccggacaaccgctcataataaatgaatatccacccgaacatgccccacgaggcaacagcttaccattatcagcatactgaactaaacaagcagataaatcatccatgacttcgggccatgccagaccccataatacgtttaaattccagtgtgtcaaccaaagcccgtcaaagccatacatattaaacttaggttttccatccgccgtaagtggaagacgacgtaccttcataggttcagacgtacgtttattgacgtatttatttccggcataatccggataatagccattcacatcatttattttatgtcgccctagcaatacatgccaaaggtcagtgtagaatttgatgcgttgagcatccgtaccaccttcaacagctatacgtcctaaagcctcattccagacagaacgggtttctttacataccttgtcaaaatcccaatggttcagttccgcatccatattgactattgcattgtctacgcttgtatatgagaatgccattttaaaaagcaactcttcagcattcaattgtccaaagttcaaaaccataccggcagcattccccgcaatagcctcaacatcgggcaagacacctttctcattccatccgtcaatgctttttatgggacggttacaatctagtacaaagcttatttttatgctgtcaggaccaccccaaaagcgttctgtcgtgaaaaattctcctacaacacgtgtattgctgacacgcagtaaggtagctttatccatagagcaattccctaaaacactacctacatccaccaataatttggcatttacattttcggtataattcaaacggtagaatgtagcccgctctgttgccgtatactccacccaagtcttataccggtccaaatacagacgatgatagcctggctgaattatttcactttcatgtttaaaaggtgatttccatcctgccataccttcagtaggatttatttcccctacaaccggcataatgttcggaccggaaatcatccattcatttatttgagagaatcctaagatatccggaaaattataattatatccgccacctccctgatttttattgcgggtgaaagcatgagcagccaccataccaaagggacgtccgcccggagtacagaaaaaccaccgtccccgggtagtttcaatataagggtcaacccactctacatagtcagtttgattaccatgtgcggcaaaaacttcgatttcagacaaccccaaattctttccattcccatctgttgcctcaaaacgaatccatttcacctttttcttagggaaagagatacttttcgggcttccatcattgggaatagctgttacactaagctgagatccatcactgaaatgaagagttccaccggcaaggtgttcagcaagagatacccggtcatacagcaccactcgatccacacacacttcttcatcccattccaactgtgcccacggggtatacatgactccccacgatgtaacacttcccttgcaagcccactcgcccttatcatcatacattattttaccgtcaaccaggttgtcggcagcataattctcattcaacacattagataccgtgacatgcgcccgtggggctatattatcttgtgctgcctgaagtacaagaatattgctgcaccatatagcagctactagcaatccttttattatgttttgattcatcattatatttttatttattatatgtctgctctccacatttccgttctcctaccgcaaaagcacaataggtgagatacaacacacaaagtaaaatgacaataactccagccgtaattccggcgttatctattgcaaacccaataacaggagttaccactccccctccggctacagccgtcagcattaacccggaaatctgattcatttttgtgggacactcttgaaatgccatcgagtaaataatagaaaatacagacgaagcaaaaaagccaattccgccaatacataatagactaacagcgggattctgaacactaatcaataatacaagcatcatgatacatgccagaatattgactttgaaatagcgggcacctgcaatgcgggtcagcaagaaagcaccgagaagagcaccaaccgttctactaaagaaatatacttgtggagcaaacttcacttgttccgcagtccaatcataccggatgctcattaattttgaactgacataatttgtagcgacatccacacctacaataaagaatattcccaaaaaaagaatgagtatggttctatttttcagcaggttgaaagaatcagaaacagatactttactctcttccacctgctctctccgaatgggagtaaacgtcaaccataaagcaaagaataatgtaatagcgcctaaaatggggaaacaataataccatttatcatcaccaaaatgcagggtagcaaataatacaatttcaggacctaccaacgaagagacagccttgataacctgtccggccgtcagactgctagtcaatagccgagggctggaaataacattattcaataacggatttaaagagatctgtaatatggcgttccctatacctagcaaaacatacgcaataacacatgttacactactgtagaccaacaatggcaaaaacatcccaacaactgttaccgccatactggcgagtactgtatttttccgtccgtatttactcattctgttaccaacaggaatccctaaaaatagaaaccagataaataccattgaaggaacaaaacctgtcatagttggagaccaattaaagctcttctgcatatagtcggatgaaataccgactatatcacagaatcccataacaaaaaaagcggcaagcacgggaatggctttcaaataagagttattctttaccataactatcactttaatatatgatctacgggtacccagaagaaacgaggctggtacaatgatgccttctcaaataccttcttcaaatcataggtattaacgttataacacatcaatattttatcatttttcatgtattgaggatgtaccattgtattataagtcatcatactgtctttttcaaaattaggttcatcgaccgtatagagcaatttctcatgactaaatgcaccttcagggctgtcggcaatataggaataaatttctttggcatttcccgaacgattttgggaaaccaacacaattttttcatttagactaaatacattgaattgctcagagatatttttctgaagtccttcaagtttcgctgttttagtagcatccgcctgccagctagccccatcccaatacacaaagttcgccagcttattatcaaccaattcagccttcgccacatgaacaactgcctttgctcctgtcgagtccgactttgttccgtaaatgtagattgcattttgataaggcatcactgcatgtccatagtgtacaccattctgattggcagcagggatattcatcttatcaatgatcttcatggttttcacatccagacgaaaatagtcacaacacatatattcaaaaccaaaagatccctcacccactttcctgaacttggacatgaacaaatgaagaataccatctttcacaaatccatctccaggccaataccaacggggtgaatccccatcctgctctgccagtatatatgcagaaggattcttcaaatcaccactatacaaggtctccagttctcctttctcattgataatcgtaaaagtgttacccatcacaaatttagagtctttactccttttatcatcgacaacatctccaaaaaacgagtcaccccacataaaaagattccgtccatccttcaagtctattgatatagcaccgtcacctcctgtcactccactgccaagtccaggcatcaaccgtgtacaccacattgaatccagttcgacttccatctgtgttacagatgacttattgttgttttggcaagatacaaataatgtacaggccaacaaatagataaacttattcataattctatctttttggttattgtccatagccttcattctgcgtaatcatgttttgtgacaggtctatttctctttgaggaataggaaatttcacatggtattctttaggagtagattccggtttggcagcctttatgatagacacaaattcttgcggtgtacacatcctggtcaaatcaaaccaacgatgtccttccatcacaaattcatgacgatactcattcaatacggtcttcttaaatcccttatagtcagtaggtacagccgtggtcagtccggcacggttccttacagcattaattgcgattaccgcctcctcattagctccttgatttatttcattcaaagcttcggctataatcaaatacatctctgctgtacgaattgccggaaatatagcctctgtattattccctttaggttcggcttgactatcccaatacttaaaaacatagggcttatcgaaatccttaatgctaccatcactataagtaaaacttctcttcaaagtaacatccaggcgctggtcattctgccggtcaaagctattccataaatcttcggtagcattttcccatccttgggcattgcttactccgtcaagggcaggcaataaacgtaccaaaaactgtgcacctttccaaccttcactcaacgttgcgctaaagtttactccccagattatttccgtattaaaacgattggccactttaaataaatcaccgtagttttcaagcatagggaaattcgggatgacagatttagccttgtctacagcaagctggtaatgctcctgactatgatgttctgctgcataagttagataaaccctggctaacaaagctgatgcagatgcaggataaggtcttcctccgccaaagcgttcagtgtacttcaaatcggtttcagcagtcttaagatccgaaaagatcaattcataaattgtctctttggaggtccggctagttgcatcttcctctgcactttcaacattatgttcgcgtaaaggaacatcaccaaacatccggatcaaatcaaaatacatcattgctctaaagaattttgcttcggccaccaactgatttcttaaagtcacatccatatcaatagatggaactttatcaatcacgacattacaacattttatcgtttgataaaaatctctccacagcaattctacaggctgattatattggtctatttgcatattttccaccgattggtagtcaatgctggtctgattagtttccgaattatcagcaaacatatcctgaagaacccaataatcattgtagaaagtaccaccatagtttttatcccataacccattcggagcatatccgataatcaaataatcataaatagcattggtggcggatatagcatgctgagctgttttataatatccttcacttgtaatattccctttaggcacttcgtcgaggaaatccgaacaagcagtgaacatgaatgctccactcaataaaatgcttaatatgtattttttcataatctattcttttttaaaaattcattcttaaaccaaactcatacgatttagacatcggataagaaccataatcagctcccattgaaagattgtcgttagaaaaacgacttacctcaggatcatatccggaataattggtgaacgtataaatattctttaatccggcaaagattgtaagtccctcacaataaaatttctgaaggatgcttttggggaaagtataacttaacgtgatatcttttattctgagatatgaaccgtcttccacataatgatcggacaaaatagtaccagatgatttagtcgtggcacgaggatatttattagtaggattctcaggagtccatctttccaatgctgccacagaattatttttatgtccgtcaaaactttccaatgaaaacttattgaagttcacaatctcattacctaccgcaccttgcaaatagactgtcagcccaatggatgaatgatcgcgcaggttataagtaaaggtattattgaatccgaaagtaaaatccggattagcatttcccaactcatataaatcgtcctcattaatcacattatcaccattcttattgacatatttacgatcaccatgtttcaaggtttttccagagaaatatggaattttagacaagtcttcgctcaattgtgctattccatcagttttatatccataaattgtaccgataggcttaccctcatttattttagtccaataggttactcccaaaatagatgcccccgaaagattttcctggcttccagctaaatctgtaatttcattcttattgtaaccgagagtaaaattcatatcccagccgaatttaccggcaaaaggtactgcacccaaagcaaattcaaaaccctcattacgcagactgccaacattctttacggctgtatcataaccggtattaaacgacacaggcatagcaagcagcaagtcgcgcgtattttttcggtaatagtccgcagttaaggtaagacgattattaaataaacccaagtcaaaaccaagattcacctgcgaagttgtttcccacttcaagtcttgattactcaatgtataaggcaccacgccggttgccacttcactattgccaaaatacgcttctgtgttatacatcagcccttgcgaactatatggaggaattccttcattgcccacaataccataacttactctcaacttcatatttgaaatggcttgcgcccgcttcatgaaattctcttctgaaattctccatgcacccgagattgaagggaaaaagccatatttattgcccttaccaaattttgaagatccgtcaatacgaccggtcagactcattaaataacgaccaccgtaattataattcacacgagccaaataagataacatctgccattcggagatacccgaacttgcagcttgacgcaacgctcctgattgtattgagttgaatcctaaaaatccgtctgtaaaatcagctgttgaaactgccgaattttccgagacaaaagcttgcgctgtcataccggccaaagcgctaatcgtatgcttctcaaaagtgtttgtatagttgacggtattctcccatacccagttgtaaccgtcacgatttcctatgctggcatagccaccattcgattctgcacgtttaatctccccgggagcaaaagcctgatcctttatatagaaatagtcaacaccgatactagtcttaaaggttagatttttaattggaacccattctaaataagcattagccaatgtccggaatgaagtatttctatttttcgcttcataggcatcttgcacaggattacccacattattagttgtagtcaaattgttttcataaatgtaatctccggattcatttctcacgggaagagccggattcatttccaacgcccaagaagtgatagaagaagcaaatcctccttccgagttcgttactacaccatttgaacggctataactcagatttacagaaacgccagtcttcagccatttatttatttgctgccccaggttaatacgaaagcttccttttccaaaatctgaaccaataattataccatcttgcaacagtaaattaccggaaacaaaataagtagttttatcatttccacctgatactgaaatatcatagttctgcataggtgctgtacggaatatctcatcttgccagtccgtatttagtttggacagattattcaacccagcaaaaacgggatttctttcttcaccagcattgtccgttgcctcatttcccaactcggccaattggaccgcattcagcatatccatttttttagttacctgctgcaatgtgtatttagctccgatagagactttaggctttccattcttaccttgtttggtagtgaccagcaccacaccattcgccccacgggcaccgtatatggaagttgcagaagcatctttcaaaatttcaatagattcaatatcattgggattgatattagtcaaaggattaagagccggattctttaaagtcccggtgctgaatgtatttgcatcactaatcacaggaacaccatcaatcacatacaaaggttcattgtttccattaatagaactggtacctctgattcgaatagaagttccggcacctggctgacccgaagtgtttaaaacagccacaccggctgctcttccctgaataccctgatctaaagaggttatcgaagtggaagataattgttctgacttaatagtagaaattgacgaagtcagatcacttttcttttgcacaccatatcctaccactaccacatcagccaatacttgcatatcatcttccagcactatgtgaaattctctcttttgtgcggtaactttaacgatctttgtttggtatcctacaaaagaaatctcaagtactgatttgtcgggaacagataatgaaaactctccatccttattagaaatggttccataagttgaaccttgctgtaaaatagtagctccgataatggggtcacccattgcatcacgaactgtacccttgacgttcaaactttgattctgtgcactaacacttcccagaataaacatcaacaacaataaagttatgctcctaaataaattattcatgtgtttttatgattagattgtttattaataagatcccggattacaagacgctacaatatagttatccggattttgtccccgataaggagtaaaatcttcagttttggatactggcgtataaacttccaacactctttcatttgaagaatagccatcccccagccctgaaaggtcttgataactttccaatatcattttacgatccgacaactgtaatacattataatgagtcatcaaagcttgggacggtgaaaacacattatagtgaatggtagatagagtcttgacagtagcgccgtccatggtaacctgccatgcacaataggagtttaatgtttccaaagcagcacttgagaatatgaatccccaatcaacctgccaagtcaggtctgaattaaaccgatgtatatcatctttcaaatcgggagtagctgtatcttctcctttaatagtttgtgatgccaatacccagtcatattttagcaataacggaatctgcgccagctccactgttaaaaccagatctgcggcatccaccacactattattctcatccattccataaaaggagtacactaatattccattttcatcaccggcgataatctcctcagtgaatgtatatggaaagctcaattccttcacattcagttcctttaaataagaactgacttcttttccttcgatacttttcttaaccacaatttttgaaatcaaatcaggatgagacaatgacagttctacagaaacataatccccaatcttaattttcccctccaaaatacttaaggtcagtaaccctgtctgttgcttatcatcactcttacacgaaataattaatgatgatatcattcctaatacaatagaaatgaaaatgattttttttagtgttttcatatgatatttagtttacgaatattacgttaaatctattttttgtagcgcataggcataagcacctcgcataatagagcggctagcaccttctttactgcacagcaccaaggtctgttttaattgatgataggtagtagtcaaatgagtaccaggaatgacaacctgactatcagataaactcaagaaacgagctctctccgattcatcttctccattatatacttgcatagaaacgcatggaaacttatttcccgaaaaagttgtcagttgtgccctaagttctgttatcagagctggtaatatatattttgaggctcctgcgactcctccacctataaccaccagaccatccacaacattcagtaccgaagcaatagcagcacctgccattataccaagttcattaaaacttgcgattgctgcatgactgtcaccttcctttataccttcagcaatgtcataaatatcttttggacttaatgaagcagagctttgtccggacaaatcgctgtatactcttctcacagcgcgtatgctaacactttcttcagcaagcatatccggatatttcttatttctcataagccagatgtcccctccacaaccattatctccggtcaacaagactttatttataacaactcctgcaccgaatccggttcccaatgttataccaatcaaatttttatattccctgctgcaaccagctaaagataattccctgtttatcataggcaatgcacccgataaggcttcaccgtaagcaaacagatttccatcattttctataaaaaccggaattccgtatttatgcttcaaaaaaggacctaatgcaacacctcctctaaatgaaggaaaattgggcaaatctcctatgattccattctcataatcagcagggcccggaaaagcaaaactgatcgcaactgggggaactggtatagcagctatcactctatcaaatcctttcaccaatacttccaggcactcgtctaagttatcagaaactgccggaagccctattggacttatcatttcattattcccttgaatggcagaaaatacaaaatttgttcctcctgcatccagagtcaaaactacccgtttatcatattcatacatatactattttaggtttaaaagttcaagtactaaaatctgacatatgccttgatagtgacacattccttatcgcgacactttccataaggtttgattgtatattcgccaacagaagcaggaatgataaatgtttccgcataatgcaccacgaaaggttcaaaggcgtgagtaggactctcaacgacggcctcttctccctccagcagattcagcacatttacactgtcgtttgtgtgatgcagcaccggtgacgagaaacggtgacggcgggtttcgataaattcattcggatgcaatccggtacgttcctcaatccacccatctccggaagccacttctttaaactggttgcgaagatgttcatttacatatcccgtatcccggttccagttgattacgcatttaccacgttccacattgattgggcgtggttttccatccagtcccagacgttgccagtcccatagtttgaaagtaaagaggttcggagtcgaactgatttcaagtaccatactattcgcaccggaacaatgaatcgttcctcccggaatcaggaagtgatcgtgtttctttgtcggaatcttgttgacatacttttctgcgtcgaacaccaattcgcctttttgtgccttacgcaaatcgtcgatcatcgcttctttatcaacgcccgttttcactcccagataaactacggcatcttcttccgcatctaccatgtagtaactttcatcctgtgtatagtacataccgaaactatcacggataaattgagtggtaggatgcacctgcaaactcaaattacctccacctatcgtatccaaaaagtcgaaacggatggggaagtcttttccaaagcgtgcttccaccggttcaccaagcaactctttacttttcagcaaaaccaaatcgaccgaaggaagttcgaagcgcactccgttcacctcaaaatagaggctgttttcttcgggcacacagtcaaagcaccagccaaaattttcgcgttcacgatccaagtcgcaaacttctttcatccattgaccaccccagggagccggatcgaagaaaggaactacccggaacggtgttttcaccgttgcctctacccctttaaagaaagtatccttatcaatcatcttcggtgttccggccacatgggtgtcaatccagaattctaccctgtcaaacaatctttccttatacctatcacatactctccaatcattgaaatagcctctcttgtattgcaaagaaacggcatctttccgattgtctatccctaaagcttttacctcatgccgacggaaacgttgttgaatttcccaacgtgccatatccgcatatacaatcatcgcatcctgcggagccaccatggcagctcccgtacctattattacaatagtatcctccgcttcactaatttgcttttgcgcagcagccaatttatccgcatcaaaataatcttccagcttcaaattggtcacatagccaaacaacacatcttccgtcatgaagcgttccgtcaaagtttggatctcttgttccggtttcatcaaatcacgtacattcatcacctttccggagaattcttttgaaaaagcatccagcacttcttcttcatatactccagtatataaatccactgccagcacttttcttgcatccatttgcttttttaacacagaaatgatagcatcccaaccctgaacaagcatccccgccaacttcgtagaaggaaatttatcataattagcttttctcatattatagttgtttttaattttatatgttcatacatattttagattgtgcaaatatatagattttatttttattccaaacaaaacttggattattttttgataaatcttatatttgctgaaaataaaccaatccggatagatatgaaaatagaccataatagtgataagcctcttcatattcaagcagaagagatacttagaagactcatagaatctgaagagtacaaaaacgggaagctatttcccaatgaagtcgaattgtctgaacaattacacatttcaaggaacacattaagacaagctatcaacaaactcgtatttgagggacttctagtacgaaagaaaggatacggaacgaaggtggtaaagaaaggtatcgtaggcggagtaaagaactggcttagtttctcgcaggaaatgaagatgttaggtatcgaaattcgtaatttcgaactacatatcagtttgaaacgtccgactgaagaaatcggcacattctttaatttaggttctaaccctgatgcccgctgcgtagtaatggagcgcgtcagaggaaaaaaggaatacccgtttgtctactttatctcttatttcaatccgaacattccattgactggagaagaagactacacacgcccattatatgaaatgctggaaactcaatataacatagtggtaaaaaccagcaaggaggagatttcagcgagacttgcaggggaatttatcgcagaaaaactggaaataaaatccagcgatcctatattaataaggaaaagatttgtttatgatgtgaacggagtgccgattgaatacaacatcggatactaccgggcagacagttttacttatacaatagaggcggaaagataaagagtatgttcatacatacacgatataaaaagactattttaaaggccgaaattcttatcttcctttaaaatagtctttttacattccatttctttgcattatgctttatccatcatttatcatctcttctcaaaccgaccaacagagtgtccggcaagaatccggtccaaactttcatccacaacacctatcatctgaagcttggacaataaatgataataggagatttttcctactccttctattctcaacaggcttttccaccctcttcccgatacgatttccaataagtcctttaccgttcgagcatcttgattatacaagacattagccaaccgcgtatcagctactttacaaacgggtaattgaagtatccactcctcctgctcaatatttatattcttattattatctgccaaagataaaaaacgggcattgatagcacgttttcgataagtagccaatatatctttcttcagttttaatcctttaagtatagagttataaatttgcaatgtcttttcataggtaattcgatgcctaccagccactttctctactgattctcctatagaaatagaatagaaaacattgcgggcaacagggtgaagaatcaatgctgccagttcacgaatgattatttgatatagaggtttacaagtcttctgtgttctcaatacatatagcagatcatcgtatttggaaatgataaagtcacgttccaatttcttttcttctacgattttggaaaggtaacctgcttctaaaccaagtcttttgtgagcttccagataagcatccaaactctcatcatccaaaaacaactgatcgttgattcgggaactcgtaatatatccaagatttgcccaattctttaaaatagcttcttggatgtcgcgtctttcagacatctgttttgttgtgagccaatttgacataaaaaaacggaactagattaataatatcaactagttccgtaccttttattataaaagagtacggagctgtcacaatcccgcaaacaggaggtagtagcggctacctttcagacacgggcagacagcccgtaccctatgagaagtcatagaagtacaggcgtctcccggtgtctgaaaaaaaatccgctacgatttcctgttcaccgaggaaacgcacaatcgcataccataaaacggcatgctacgttccaatgacaaaggtacaaattcttttcggaaaataacaagagagatttataaatgtttaggaaagaaaacgaatgatgattgtataattaaagcgtatgtatataaaaagcaggcttcaataagtttttcgtttcatatatagaataaaaggtgtgtcgttttgtttcgtatacaaaacaaaatatttgataaagctgctctaatctatttcataatatcattcaagtcaaaataaagcaaacgtgtagcagaatccacatcttcactattcaaaggaataaatccattcttatcataaaaagaaacagctgccgcatacacatctacagttaaaaagcgacaatccgttttattttcaagtacattacttacagctaacaaagcttcccgataaagaaaagattcgtattttatttttttaagattttcattgccagttcataatctttcaacctttttcccgctgctccggcgtttcactacgcttctctttcatccgttcttcaaatcgccgagcatcttctccgaaaagtatcggagtttccttaattggtcttgccatacctatacaactcctttcttttggtttatacgctactaaaacaattgaataaatcaggaagtgcaagttattacgaagttatcttttactcaccagctttattttgcatacgaaataaagtaaatagcctgtattattattttgtatatagaacaaaagacgtacctttgctcttgcaagcagaatataaaataaaaaaaggataacaacagcaaactataaaagcatcgagaatcatgaacaaaaaaattgactttaacgacgtcccaaaaaattatttatactgcacctataacaaatgtccgcgccgcaatgaatgcctacgccatcaagctacgctccgtataccgcaaaacgttcctgatttccgaacagtcaatcccaaccacataataggaaacgagaataactgcagttttttcaagccataccgtacttcacgctttgcctgcggaatagaccacatattggacaacattccatattctacggctgtcatcatccgcaaagaattatattctttgatggggcgcagcatgttttaccgcatccgcaacaaagaacggatgctgcatcctgacgaacaaaagcagattatcgctgtctttctaaaacatggtatcgaaaacaaacctgaattcgaccaatatattgatttattcgattggtaagacctttatcagaaacactataaaacggcgtttccggatattctgacaagggacaatactcacacctatgagaaaaaatactcataccaatgggaatatattctcataggtatgagtattttttctcataagggtaagtatcattgagaatcttatcatatctccgacgagagttgtcccgccgctttcaaataagccacataattcacatacaattggaaatgggcatccactttcgtctgataagcctgctgccaaagcacttgtgcttccagataatccgaaagagtttccagtcccacttcatattgcttaccactgactttcatattctcctctgcctgttccagcgaacgttcggaaagctccgtttccaaccgggcctcatccagattattggcagcttgcatcaactccagcaacatcttttcattgacattttcctgttcaagacgggcttgttccaacttcactttggcagactttactttattggtacgttcgccaaaatgaaacagaggaacagagacattcaggaatacggaaaaagcacccttcttcatcaaagtttcatcattgacttccaatccgtgaagataatcataactacctctgacgccgatacgcggtaacagctcactacgattcagctttacctcctgctcggcaatggctatttgtttgttcaagattccatattcaggacgggcggtaatatcagaaacctgcactttccattcctgctccacttccggaaaatcatcagatatatcaatctgtgctgtcaaagggcgtccgatgtaatgacagagattcatacccgcaagacggagggcgttatcagcctttcgcaaagaaagttcactctcgttgagcttcacctgcactttcagtacatcattttgcggtttcatgccatgtcggtgagcactcttcacatttttgaaaagttccgttagtaagttatgatatttttccgccacttttctcatttccttggctttcactaactgcacgtatgctttatctgtattcagaataacttccgaagtagttaaggcttcgttcaagtgtgccatttcttttcccagtagtgacattttataggcagcacggatttttcctcccatataaagaggttgctccacttgtataccgcccgagtaaacagttccgaccttataatccagattcaatccgggaaaataagcgaaaccgctcgataccagttctccggtagcaggattgggcaggaaaaccggaaggtttcctcccggaactccgagacttccatccgctgtgctataaatacccgttccgttggctgtaaaattagggaagaaattggctttataactaagagacatcaatcgggctgcttccgtctgcttattagcggcagccatatccttattatatttcagtgccatttcacggcattgcgccagacttagtttttcttgcgcggcaagagaaaccgacaggccgaacaatacacccgctacactaatggctacaagaatttcttttttcatttgtctgtcttttttatatgaaagaataatgcatacaaaatcgggataaaaagcaacgttatcaacgtgccgaacagcaacccacccatgatagaagccgccaacgaaccaaacatggcatccggcaacaatggaatcattcccaaaatcgtagtcagcgaagccatcatcacgggacggagacgactttgcgaactgtctatcaatgccgtcacaggttctactccctgattaatctgcaaagtgatctcatccatcaagacaataccgttcttaataatcataccgatcaaccccaatgtaccgacgatagccacaaagttgaatgtcttcccggtaagcagcattacagcaacaacaccgacaaataccagcggaatagtacagaagatgataaccggtttccggtaatctttgaacagcatgattagaatggatatcatcagaatgatagcaaacgggaaattcttgaacagatattgcatagactttgtgctggcgttcctctcgccttgccattgaagccgatatccgtcaggcagcggaatctgttcaatctgcgtggcaatggattgccgcgccttctccgtttctacccccggaacaggagaacattgcacccgttggctacgctgcccgttataacggggaaccaccggatcttcccacttcacatcaatccgcttactgatttgttttaacggagttgttcccatcaacgtttccaccagttcttcttttgatagtgttcctgtcttcagtttcatcatcatttcctgtgtcagcaaaccgttcagagaaggaagagacgagaatatctgcgtattgtccaggttttcaatcggatttccgtgttcgtccaggcaacgcaagtagatattatctttgtgaataccttcgtagaaagacccgatagggatgccgctggtagcggtcagtagagataggcttacatcattacggctcaatccgatagcacgtgccgcaggctggtcatattcaatagtcagtaccggaatttgcggttcccagtccgtggtaatcaggtaaacatccgggcaattctccataatcttgcgggcactgtctgccaactgatgcaaaacagcaggatcaggaccggtaaattgcgcttcaataggatattttttgaacatcagattgtagcggttcatctttacgtaagcatccggataatgttgtgaaagatattgttgaatttccgccatgttatccaccaaatcgtccggagaggtgaagtcgataatcagttcaccgtaagataaggaaggattggctacgttacgcaccaagttataacgggcaggtgtaccaccgatagaagtagtgacgtgtgtaacttccggacgctttttcaggtaaacttcgatttcttccaagtcatgtgctacacgagtggagttagtcccttccggcaatttatattccatgtaaagctgatcgtagaccatatccgggaaaaagccctgcttcataaaccgataactgaaagccgaaagcaataccaaagcaatcattgtaaacacaaaactccaacgatgtgccagactgaatttcaataatgaacggagcacagcataaatctttccttcatacacacgttttccggcagcagtagttgccgcagagatttccggatgcaaaatccggtcagccatcaacgggacgtgcaccaaagccagcacccaactaagcaataaggaaacagcgagtacgataaacaaatcgcgcgtataaacgcctgccgtatcaggagacataaagataggaagaaaagcgatgatggcaatcagagtagctcccagcaaaggcatcgctgtctgccgtccgatggcagtcattgcctccatccgactctttccggctttcaaatctaccaaaataccgtcgatgataacaatcgcattatccaccagcatccccatcgcaagcacgaacgaggccaatgaaacacgctgcatcgtaccatccataaaataaaggaacaggaaggaaccgaataccgtcactaccaaactgataccgataatcaccccgctcttaaatcccatagcaatcatcagaataacaactacgataatcacagattctatcagattaagaatgaacgtccccaacgaactgcctacgcgttccggctgatagaaaactttatgacactctactcctgctggaaggcgttcgactttcagttgctccaatttcttttccacttgatgccccactttgataatgtcggcatccgaagaagcggccaccattattcctatcgcacgctgacggtcataaaacaattcgttgcgggtaggatcttcataatctttctcaatacgggctatatcactcaaccgcaactgatcggcatcatgtccctgaatcagcatacgaccgatatcctccaccgtcttaaacttgtcactgactgtcacccggatacgattatcgccattatcatagtaaccagtataagtcgtttggttctgtccgttcaatgtggctagcacttcggcgggtttcacacccaagttagccatccggtcttgcaaaagagagatattaatacattcgggacgtttaccgtataagtcgacgcgttccaccccatccagttcgctgacttcacgtttcaccagttctgaataatcagacagttccctatcggaaagtccgtcacccgtcaaagcgaaaaacattccgtaaacatttccaaaatcatcttttacaatagaaggactggcaccttcgggaagttctgcctgtgcgttcgccactttacgacgcaacagatcccagcattgttctacgtccgcctctttgacagtcgttttcagttctacctgaatcagggagagatcgttgtaggaataactttccacattatctatattccccatggagcgaatattcttctccagtacatccgtcacctctaattctacctgatgcgcagacgcaccgggataggtggtgactaccatggcaagctttaccgttatttctgggtcttccagtttactcatttcataactggaataagctcctcctacaatcagtacggcaatcaggaagtagattaacttcttgttctcaaatgcccatttactaatatcaatcatagcagtcctcccacattggtttcagcagccggaagaagcggttccacctgttctccctcttttacatgatgcacccccgaagcgacaaccaaatcaccgggattcgctccgtctgaagtaatcaggcatctgccgtcgctaagcagacgggtgacggtcacatcacaacggcgaatagcgtgactggaagcatcataaagaaagatactcgtacgcccgttctcacgaagaatcgctccaccgggaaccgacaggttacgcacatctccttcactacattcgatagttaccattgtattcatgccgggcgatggaactacctgtttatcttcttttttcagttgaagccgcatggtgtacaactgattggcatttgccttaggggtgacactaatcagttccaaagcatatctttgatgaggataaatatcgaatgtacaatagtagcgggtaaactgctgtcgacgaatatattccactgccggaagattaatctccacctccgggcttccctcactgatgatggaaacgacgggcataccggcagctaccgtctcatgggaatcaaaaagacgtttctgcacatatccgctaaaaggagcatacaaacgggtgtatgccaactggtctttagcatggttatatttggcggtaatctgtctcaatccgtacacggccttatcgttagcatccggtgttgtcacattttccttataaagtgccatcacccgttccgcctccgctttcacactttgatattctgcttctgtcgcatccagctgaatctgatagtctgtcggatctaattctgccagtaattgccctttacgcacataggcaccgtcatttacatgcatatactgaatagtaccactcacccggaaagacagacttatgtcctgtgccgctttcacccgtcccggaaactgcaaagctatttgtctgtcggcagaaagtacggtatcaatcttcactgccggcttactgtctgtgttttgtacacgttgcccacacgaagtcaacagaactgctaaaaatcctgttaataagaagtctaatcgtctcatattttcacttattagttagttgccacaaaagtatcccaagcaaacatgaggagaaaggttgatttagacgaaacattgttctatttgtacgttacctaagataaaaagccgaaatagtttgctatttgtatttatttgtttattactttgtaaagaaattcatttcaacgaaaaggaatatggaaccactgatgccattcaagtatgttataatatctccggaagatacttccatgaaagaaggatgcattatttccgaattcaaccaatgcggacttttcctctgccagaaaggacaggcggaaatcctgttgggaggtagaccatatcagattaacaaaaggaatcttttcatatatacagcagccaaccttctacagatacgccaaagaagcgcagacttggaaggaatcatgatagaggtcgacctggattatgtcataccaatagtaaacaaagtagctaactcggaaaatttgctttatttgcgggaaaatccctgcctgtcgctctctgaagagcaatatacatttgtagagaacttgctcaaatctgtagaaaaacgaattaacagggagaatatctgtaacagttcccgtcagaaacaacatttaatttctgaattaatcaaatcctggggacaggtgatatgctatgagttattaaacatttatttcagtaacgaaccccaaacaccactgccacaggataaaaaggataagatcttccaaaatttcatgattaccctttatcgatattatcgtcaggaacgtgatgttactttttatgcagacaagcaatgcttgtccgcccgatatttttcttctgtcatcaaggagaaatcagggagcagtgctttgcagtggattatacagaatgtcattacagaagctaaatatctgctcgataataccgatttaagtattaaggaaatagcaaccaaactcaacttccccacacaatcattcttcgggaaatatttcaagcagtatgtcggtatatctcctaaagaatatcggaacaaacttatcaaacagtaactttcttaaactgccggaactgccaccacaacattcctccggatataagactagccgccaaatctgccacaggcatactggcccaaacgcccatttgtccataatagtgaggtagaatcaataaacagggaacgagaaataacatctgccgcgtcagcgacaagaaaatggctttacttgccattccaatactctggaagaagttggaagctaccatctgaaacccaacaatcgggtagaaaaataccacaatacgaaaacctttagaagcaatgctgattaactcttcgtccgaagtaaagatggaagatacgatttccggaataaacataccgatcagaaaaccaatcgttgtcactacagttgcacaacaaatggttactttcagtacttccgtcacacgaggatagagcttcgcaccaaaattatatcccgcaatgggctgcatcccttggtttagtcccaatacaatcataataaagacaaaaacaatacgattaacaataccgaatgcaccgatcgccaaatcacctccatgctcttttaatccctgattaatcagaatcacaataaagcaagacgccatattcatcagaaagggagacataccaatagccagcgaatccaacacgattttccgtttcaaacgaaaaatcccctttttcaaccgtatcagttcatctttgcggcagaacagatgaagctgccagaccaatgcaatcaactgcgcacaaaccgtagccgtagccgccccacggattccccagtcgaatacaaaaataaacaatggagcaagcaatacattgattatcactgtcgttattgttgccatcatcgctttctgcagatggcccgaagcacggagcactgcattcagccccagatataaatgggtaaccacatttccgagcaagataacctgcataaattcacgggcatacttcaccgtttcatcgcttcctccgaaaaagtaaagtatcggatcgagaaaaggaagaacgattaccgtaaaagagatacctataataaggtttaatacaaacacatttcccaaaacctgctgtgcggtatcataatctttctgtcctagcttcaccgaaatcaatgtagccgcaccgacaccgaccaacgagccgaaagccgcggcaagattcattagcgggaaagttaatgccaacccggaaatagccatcgcacctaccccgtgaccgataaaaatactatctaccatattgtaaagagaagacgccgtcatggcgataattgccggaatggcatactgcattaaaagcttcccaatcttttccgtacccaacgcagtgggtgtcttttgtcctgtcatacctattagtttgagacggcaaagatacaaaaaagaggtggattacaggatatatgagaaaagtttcgtatttttgcctccaaaattgagttaatacgtaacgaaatgaatatattagaactaagtgaacaggaaatcattcgacgcaacagcctgaatgagcttcgtgcgatgggtattgatccataccctgcagcagagtatgtaaccaatgctttctctacagatattaaagctgaatttaaagacgacgaggagccacgccaagtttccgtagccggccgtatcatgagccgccgcgtgatgggtaaagcatctttcgttgaattgcaagactctaaaggtcgcatccaggtgtacatcacccgcgatgatatctgcccgggagaagacaaggaactgtacaactctgtattcaaacgcctgctcgacttaggtgactttatcggtatcgaaggtttcgtgttccgcacacaaatgggtgaaatcagtatccatgctaagaaactgactgtacttgcaaagtctatcaaaccgttgcctatcgttaaatacaaagacggggtagcttatgactcttttgaagatcccgaactccgttatcgccaacgctatgtggacctggtagtgaacgacggtatcaaagaaacattcctgaaacgtgccactgttgtgaaaacattgcgcaatgctttggacgaagccggttacacggaagtggaaactcccatcttgcaatctattgccggtggagcaagcgcacgaccgttcatcactcaccataactcactggacatggatctttacctgcgtatcgcaacagaactttatctgaagcgactgatcgtaggtggttttgaaggtgtatatgaaataggtaagaacttccgtaacgagggtatggacaaaacccataacccggagttcacttgtatggaactctacgtacaatataaggattacaactggatgatgaatttcaccgaaaagttgttggaacgtatttgtatcgcagtaaacggtagcacagaaacagtggttgacggaaaaaccatcaacttcaaagctccttaccgccgtctgcctattctggacgctatcaaagaaaagacaggatatgacctgaacggcaagagcgaagaggaaatccgccaagtctgcaaagaactgaagatggaagaaatcgacgagacgatgggtaaaggcaagctgattgatgaaattttcggagaattctgcgaaggtacatatatccagccgactttcatcaccgattatccggttgaaatgtctccgctgaccaagatgcaccgctctaaaccgggactgaccgaacgtttcgaactgatggtgaacggtaaagagctggctaatgcctactcggaattgaacgatccgctggatcaggaagaacgtttcaaagaacaaatgcgtttggccgacaagggagacgacgaagcgatgattatcgatcaggacttcctgcgcgctttacaatacggtatgcctcctacatcgggtatcggtatcggtatcgaccgtctggtgatgttaatgaccggacagactaccattcaggaagtattgttcttcccgcaaatgcgcccggaaaaagtagtgaaaaaagacgctgctgccaaatacatggaattgggaatcgcagaagactgggttccggtgattcaaaaagccggttacaacacagttgccgacatgaaagatgtcaatccgcagaagctgcaccaggacatctgcggcattaacaagaaatataaattagaactgaccaatccgtcggtaaacgacgtaactgagtggatacagaaaatttaataagttcttcatccaaatccatacaaatgaaattacccggcaagatagcgataatgggcggaggaagttgggctacagccatcgcaaagatgtgtctggcccaagaggactctatcaattggtacatgcggcgagacgaccgcattgccgattttaaacgattagggcacaatccggcttatctgacaggagtgaaatttgatacgagacgcatcactttcagttccaacatcaacgatgttgtgaaagaatcggatacactgatcttcgtcactccctctccttatctgaaggcgcatctgaaaaagttgaaaaccaagataaaagataagtttatcatcaccgctatcaaaggaatcgtacccgatgacaacgttattgtatcggaatacttcacaaaagaatatggtgtgccaccagaaaacatagcagtccttgcaggtccctgccacgcagaagaagtagctttggagcgactctcctacctgactatcgcctgccctgataaagacaaggcacgtatcttcgcacgccgtctgggaagcagttttatcaaaacatctgtcagtgatgacgtggcgggtatcgaatacagttcggtgctcaaaaacgtgtatgccattgctgccggtatctgtagcggactgaaatatggcgacaacttccaggctgtattgatttctaacgccattcaggaaatgaatcgtttcctgaacacggtgcatccgttgaacagaaacgtggatgaatctgtttatctgggggatttattggtgaccggctactccaactttagtcgtaaccgtactttcggaacgatgataggtaaagggtattccgtgaagagtgcgcaaattgaaatggaaatgattgcagagggttactatggtacgaaatgtatcaaagaaatcaataagcatcatcatgtcaatatgccgatactggacgctgtgtataacatcctatacgaacgtatctcaccaatgatcgagattaaattgctgactgactcttttagataatctttaaacaagaacgatatgattagtttaaacattgaaaagacatttggatttatctccaaagaaaaggtttttgcttacgaagctgaagtaaaagccgcacaggaaatgcttgaaaaaggtacaggcaaaggtaatgactttttaggatggttgcatttgccttcttctatcactaaagaacacttagccgacctgaacgctacagcaaaagtattaagagataactgtgaagtagtaatcgttgccggtatcggtggcagctatctgggtgcccgtgccgtaatcgaagctttgtctaacagcttcacttggctgcaggaaaagaaaacggctcctgtcatgatctatgcaggacacaatatcagcgaagattatctgtacgaactgactgaatatctgaaagataagaaattcggtgtcatcaatatttctaaatcaggaactactaccgaaactgctcttgctttccgtttgctgaaaaagcaatgtgaagatcagcgcggtaaagaaactgcaaagaaagtaatcgttgctgtgacggacgctaaaaaaggtgctgcccgtgttacagctgacaaagaaggatataaaacatttatcatccctgacaacgtaggcggacgtttctctgtactgactccggttggtttgctgcctatcgcagtagccggatttgatatcgacaaactggttgccggtgctgccgatatggaaaaagtatgcggatcggacgttgcatttactgaaaacccggctgctatttatgctgctacccgcaatgagttgtacaggaatggcaagaagatcgaaatcctcgttaacttctgcccgaaactgcactatgtaagcgaatggtggaaacagctttacggagaatcggaaggaaaagacaataagggtatcttccctgcatcggtagatttctctacagaccttcattctatgggtcaatggattcaggaaggcgaacgttctatcttcgaaactgtgatttcagtagagaaagttaaccacaaactggaagttccttctgacgaagcaaatctggacggcttgaacttcttagccggcaagcgtgtggacgaagtgaacaagatggccgaactgggaacgcagctggctcacgtagacggtggcgtacctaatatgcgcatcgtacttccggaattgagcgaatacaacattggtggtctgctctatttcttcgaaaaggcttgtggtatcagcggttatttgttgggcgtgaacccattcaaccaaccgggtgtggaagcatacaaaaagaatatgtttgccttgctggacaaaccgggttatgaagaggaatcaaaagcaatccgtgcaaaactataaatcaagaacgttttataaacggtaaactataaacaatgaacggtgaacaactatgctatatacatggatttgttcaccgttcattattatattcaattgattgcagtttccgattgtaccgcttattgcccgttgtaccgtttactgctcaccacttctacttctcatcttccactttcgtcttcaaaccgatttcttcctgtgctccttcacattcggctttggaagaaagatagaactctaatttcacatcaccgttcttatctacctgtttaatggtcgcaatcaccataattttggcttttgacaccccatccttaaaacgaagctgtcctttttccacatctgtcagatttccctctgtagatacttctgtttgctcataaaagagtttggtatccacttcatcgtcattctgaagtttaaaggttttcagttctgccccatttccatccaaaagcagaaaggctttcacttcatctcccactttcaaggcgggcagttcctccctctgattcgcatagtctttttcatcggaactggtattttcaccgtccgattcgatcttcgcataaagcttttctatcttgataacaggactttccccactatcagagcaggcgcctaaaaacaatggtagcaacaataatactctctttttcatgctatcgtcgagtttataacgttacaaaaatacacatattcttctaaacagcaaataattatgtagttaatcgcttgggagcgtcatttgcaactatcttccctttctaacttatctctcattttttatcgttatctttgcctcgtatacagttgtagatgaagcgaatcaaacttaaaaaacaaatagaatggcaggaaatttattaaagaagtccagtggactcatgctactatgtagcgtatcattgctaatgatagtcatgaccggttgtcaggaagccaaactcaaaactgtaatcgggatagccaacaaacagtgtccgctggacatgggagaagtcggcaatattaccagtatcatctacgacggggataacgtagtgtacactctcaacatgaacgaggaaattaccaatattaagattttgaaagataatccggaaagcatgaaatcatctatcaaaatgatgtttcagaatccggctgctgatgtaaaggaaatgctgaaattgatggctaagtgtaattccggattacacatgatatttgtagggaataagtcgggcgaacaagcggtttgcgaacttactgccgaagaattgaaagaggttatcaatacaaatgccgacccggcacaaagcggacagacaaagcttgaagcgcaactgaaaatggcgaatctgcaatttccaatgcaggccagtgaagaagtcgttgtcgaaaaaatcgaaatcataggtgaatcggttgtttatatatgcagtgtggacgaagagttgtgtcctatcagccagattgaagaaaacgcagctgaagtgaaagagggtattgtgtcaacgctagcaagtcagaccgatcctgccacccagatattcataaaaacctgcgtggagaacaataaaaatattacctacagatatatcggcaaggattccgggaaacaatacgatgtagttattcccgtgtctgatctgaagaaaatgctcataaaaaataaaatatcatcttaaaaagattccgcaacgtacaaagtatgaaaaagaaactgaaagccgtcctgtttgacatggacggcgtactctttgactctatgccttatcattcggaagcctggcataaagtaatgaaatctcatgggctcactcttagtcgcgaagaagcatatatgcatgaaggacggacaggagcctctacaatcaatattgtttttcaacgtgaattgggtagagaagccacacaggaggagatagaaagtatctatcaggagaaaagtgttttgttcaattcatatcccgaagcaaagcctatgcccggtgcatgggagttactgcaaaaagtgaagaaggacgggctgattccgatggtggtcaccggctccggtcagttatccctgctcgaacggctggaacaccactatccgggaatgtttcacaaagaactgatggttacagcgttcgatgtaaaatatggcaaacccaatcccgagccgtatttgatggctttgaaaaaaggagggatcaaagcggatgaagcggttgtagtagaaaacgctccgttaggagtggaagccggacacaacgcgggtattttcaccatagcagtcaatacgggtcctttgaacgggcaagtgttgctggatgccggggctgatttattatttccatccatgcaggcacttaatgacacctgggacatgatgactgaaaatgacatctaaaagctgaaaagaaaatttattcttcaaaacagaagaaaaatattgaaaagcaggaatataaatagtatttttacgggagtttaattcgcttagattctatctaagccaacgcagattctactatgcaaaagttattatctttaccacccaatttgatccattgcttccacgaactggaagaagttaaccataccgattggttttgtacatcagaccccatagggagcaaactaggctccggcggcggaaccacatggttattgcaagcttgccatcaggcattcgctccacaagagtctttcagcaactggataggacacgaaaaaaaaatattgctccatgcaggcggacaaagccgtcggctacccagctacggcccttccggcaaaatattaactcctatcccgatcttcagttgggaaagaggacaaaagctgggacagaatctgttatcattgcagctcccgctctatgaaaggattatgaatcaggctccggccggtctgaatacgctgattgctagcggagacgtatatatccgttcggaaaaaccgcttcaggatattccgaacgcagatgtagtatgctacgggctgtgggtgaatccttcattggcaactcatcatggcgtgtttgtttccgaccggaaaaaaccggaggtgctcgatttcatgttgcagaaaccttctttggaagagttggaaggattgtcgaaaactcatcttttcctgatggatatcggcatctggattttgagtgaccgcgccatagaagtattgatgaaacggtcattgaaagaaggtacgaaggatattacttattatgacttatactcggactatggtttggctttgggagagcatcctaaaacgaaagatgaagaaatcaatcagttatccgtagctatattgccgttgccaggtggagaattctaccattacggcacaagtcacgaactgatttcttctactttagccatacaggacaaggtacgggaccaaagaagaatcatgcaccggaaagtaaagccaaatccggctatctttatacagaattccatcacacaagtttctctttctgccgacaacgccaatttatggattgagaatagccatgtgggaaaagaatggaaattaggttcccgccagattattacaggagttcctgaaaaccagtggagcatcaatttgccggatggggtttgcattgacattattcctatcggtgagaatgagtttgttgcgcgtccgtatggattggatgatgtattcaaaggagcgttggacaaaataacgactacttaccttaatgttccttttacccgttggatggaagatagaggaattacctgggaggatataaaagggcgtacagatgatttacaatcggcatccatcttccccaaagtggcttctgtggaagatttaggcatattagtacgctggatgacctcggagccacaactggaagaagggaaaaaactttggttgaaagcagaaaaagtttctgcagacgaaatatccgcaaacgccaacctcaagcgtctttacgaacagcgcaatgctttccgcaaggagaactggaaaggattggcggccaattatgagaagagcgtattctatcaactcgatttgctggatgccgcaaatgaatttgtacgtttcaatctgggcatgcctgacgtcttgaaagaagatgctgcccccatgttacggatacacaaccggatgcttcgtgcacgtatcatgaaactacatgaagacaaggattgtgccaaagaggaacaggcagcctttcaactgcttcgcgacggtttattgggggtaatgagcgaacgaaagagccatcccatactcaacgtttattccgatcaaatcgtatggggacgcagtcctgtgcgtattgatgtggccggagggtggacggacacacctccctactctctttattcagggggaagtgttgtaaatcttgctatcgaactaaacggtcaaccaccgctacaagtatatgtgaaaccatgcaaggaatatcacatcactcttcgctctatcgacatgggtgcaatggaagtgataaggaattacgaggaactgcaagattataaaaaggtaggttctccattctctattccgaaagccgcccttacattggcgggctttgcaccggcattctctacggaatcttatccttctttagctaaacagctggaagatttcggttcaggaatcgaaattactctgctggctgctattcctgcgggctctggcttgggaaccagttccatactggcatctaccgtgctcggagcaatcaatgatttctgcggattggcttgggataaaaatgatatatgtagttacacattagtattagaacagctcctgaccactggaggaggttggcaagatcaatatggcggtgtcttttccggtattaagttgcttcaatccgaagctggtttcgaacagaatccattagtacgctggttacccgatcagttctttgttcatcctgattaccgcgactgtcatctgttatattatacgggaattactcgtactgctaaaagtattttggcagagatcgtcagttccatgttcctcaattccggtccgcatctaagcttgctggccgaaatgaaagctcatgcaatggatatgagtgaagccattttacgaagtaatttcgagagtttcggtcgtttggtcggcaaaacctggatacagaaccaggcattagactgcggaaccaatccaccggcagtagcagccattatcgaaaaaatcaaggattacaccctgggatacaaactccccggtgcaggtggcggaggctatttatatatggtagccaaagacccgcaagcagccggacaaatccgacggatactgacggaacaagcccccaatcctcgtgctcgttttgtagaaatgactctttctgataagggacttcaggtttcaagaagctaaagagaaagcgttaccatattgccggtcaatcatccggaaccataaaaaacaagcttggacagattcaaacgaaatgtccaagctttaatttttcaacgccataatgatctgttttacatgttgagacttgaaataactgtaaagtaaatcataataatgataaaagcaatagctccgataatcagcgcaacactaccccatttcttttttctagcttcttccattcttatttatatttattgggattaatataatttatcgtcaaatgtctacatctggaaagctatgaacatactactacagaatatcattccttactttttcatatctacaaagttagcatttctcacgagaatccttttatttaaatcaactttttcattctatttaggctaaattatgcaactacatacaataataactaactaggtttgagaaaatgcaaagcaaaatacatgactgactatctaaggattatgaatgtaaatatcaagaatatgaaacacatttattttactcattaccgcttttatatcacacaaaaactgtacatttgcactataaataatatactagactaaaaaaaggatcaaaaacaaataaaatataaagatgaaattacttaaactattattcttatccgccatcttgctatccgcatgcaacaatgactcgacagacactccggaaacaggagagcccaaacagattatcgtagaaatggcctccaatgattttacagatgtctccggcacatatactcttgagaacaataaagaatactgtactcggaaagacggaaaatataagatattattggtcaagagtacatatataaataaggagggaaaggaaaaggatattcttacctatggcattctggatgtagcaaataaaaaatacatctgctatacagccaacatagatgtagcccaaagacttgaaagagactgggaattttataatcaaataactaatccggattttccagatgacccaaatagacgattagtttgtaattcttatacaaagaaagactaataatagaacctcttacgagataaaagaaagatttcactttgatagtcaacatataacattggtttcttgggaacaacaatagaccaacaaaaatcaattacaagggctaaatcctgcatttagttttagttatccaaggtataagaaaacagaaatccctcaataatcaactgattatcaagggatttttctgtgacccggtgcgattcaaacgcacgaccttcagaaccggaatcaggcatagtaacacctttatctttaatagttgttagtttgtttatactttctcttaacagcctatagaacaactatagaccaacaatagtagtattactgctatgctagtatcatactactaatagcacttggagtgtgctaagtttcttccttttgtttcataactaaatcagtttaaagtgttatctcaataggtctaaatctgatttgtgtatcaatgaagtagagtttatcatcaataccatacagcacattattaggtactgcatcaaaaacctcatattctgcattgtgatattcatcctcatagaccatttcaaagcctaatgcttgcatgtgttctgctatttcttcctctgtagcttctcttttagctctgacataaggttgaactaacacagcacaaaactcatattgactgttataagcaaagccaatcatctgataagtgacattgctaaagaataggttatgagcttctatcctaatgaagaagttctcaaggtcttcacctgcatactcaaagttgtttaatttgaatacaacatcttcatgccctgtgaatacttcattttctccccctttactaaggtaagataaggggagagagttaatgttaatccataagttatgttgagtagcaaatagttttagctcttcaatttgccttctcttatagccttctgctggttcaacatttcctgttgcttctttttctcttctaatgagattggttgcttctgccaagaggttattgacttgagagtactctctatccattgcttgtggaattcattaatatatgttctatccatactttaatctgttaaagtggttgatgcaaatgtagtaaatcagtctgatttatccaacattacacttctatttatttagaacaccttctctatagatgagatgtagctataatggtaaggataaccataacataagtcttattgctttcataattattcttttttcttcattttaagatacaccttgttgtcttttgttattataagcactggagaatactcattaaatagtgatacttttggatgaaagtcaccctcatcatagttattcttttccataaatagcattatataatctctggcattatctataataactctagctgtaagttcaggacttttgtaatccatatatgagagtttataccctttatcttcaacagaacttagatctactatatactttatttcaagaggtactattttagctatataattttgagtatctgatgacccctgatggttatatagtataattgctgttactacaaatcctattgctaatattataaggagtattgtttttcttattttattcataattgcttactattagtttgttgaaattaatcacccacttgttctccagtagaaagtcagttccaagcaagccatgtacctgtatgccactttcatcttcaatgcctttaaaggtatcaagtaagggtcttacacagaacttgggcttataaacctgaccttcaaaagtgaaaggtagagcaaccatatctaccttatgcttagttccttctattccactgatataatagtcaccaactggttctactatatccttgaaatattctactacagtactgtctatcaggctacaggtgcttccagtatccaagatgaaacaaaggtatttattttctattttcacatggataataggaagttgtactttatttaaaccatttattatagagtacataatgttagtcccagttggaatattctttctgccaaacgacttctcctctcttattgatatatccttcaatcattaatgcttctcttttaatttcgaaggaagccaatccttttttgaaggaagagcaattgtcatatttacatggaatctttacctgaaaggtagtatctatatacccccaaagattgtcttttttaatagccgcatagttctccttaaatggttttacttcttcatattcttctgatataatattcattcttttatcaacaaatacccaattagtactatctatttttactcctgcataaccattgccaaatcttgttatatctattaatgtgccatctattagatagttgccattctcgtcaatgaaattataacctaaatttagttttccaagatgattataagtacaagcaattccatcattatagggataaattgttgtagtcatgttgaagggagtacctataattttacctgatttattgatgataatggaagacttagtaaaactaaatttgccatcatctctccttttcatctctctgaattcaacaatagccttactttctctaaaagtggatgcagaagagtatttactttcaataacaagattaccattaatatcaatatatccccatttaggtgaatctcttagacctttatttaaaacctgaacagcggctaatccttcagtaaattgatatccatccttgtattggggagtgataatagtttctcctttagaattcatataaccaaataatttcgttatgctgtcttggtataaaatcctatcatcagaacagcttaaccattgtaaatttagttgtttaccttttgatattagttcttttatactattccaatcattctcaatattttcaaattcataaattagagttgtgtcaatagctaatttattatctaatgagatatatccatatttgtatctaatcttcttttgttcagatagtagattaataaatgatgaagccttcttactcgtgagagtatcggaaagtataacacaagtggtatcaacaataattaatgctattccttcattaaaatatgaggcatataagtattgtggctttataacttcattacctaagctatcaatgtatccatattttccatttttatatataggatataaatttgtggggacttgactacatgaacatagtactaaagtacaccatattaataataaataggaactataatttttcatttattctttgatttatgtcatctataataaaagatagcatttgattaatttgattgatattgcaagtaaaaggataaccatagccagttttagtaatagctatgtaactattatgagttggattactttcatcgtttgcaagtgatagttttgacaaatctcgaataattagtgaatgtgttattggaatattatcaacattcactactggcatagagttaagaaaggctgttaactcttctgtaatcaaaattctttccataataaatttccttttgtagcatactacaaaaagaaagtgtgagcctaaccttattgggagtccaaggtattaccacatacctacaatcacacaatataagggaagcccacacctaatggtatgagtatccactacttactgctgtgattgttagtcttcaaggtggtaattttaggactgtcacaagtaagaagcaaacacttcttttctaatatgtcttgttaaacttctatttcattagttgtcatttaattaatactgttgcaaagatagaactttccagtaatacttcatcatttgactgccataatttaataggtttcaaagcatattagtaccataggtgcaggctatatccttattgtacaaaggtaagcttaattatttactttctatatgctaaattgataaatagagcaccagtaactatcaatattagccactgtaatatcatatccaatgctgtcatatatacactagttaaagccccagtccattacagaactagggctatcaacaacaataaaatcacatagtaagaggcatataacctcttaatccttaagtatcatactggtgaggacaaaccctaccagaatcaagataatctcacacataattcaatcaacatttaatttagtctaacttactaactattgctacaattcatgtttacatacttcaccgaacctcaagtggttaagttattatagcagcacttccctctatcctgtaatcaaataccatcaacctatattagaagaggcagtcaacttctattaaactgtcctctgatttgccattctgcatcacttactttgtatatataatatgtaagaaagtgagacaagagaaatttcccatcataatggtataataacagtagaggggaatggatttaatagaaggtaggatattgtagaccttagaaggttaagtatttatagttttccttcatcataataggagtagtattccttctctgggcttaagattacatggtctgctacatgaatctccatgagttctgctgccttcttgaccttttcagtcaaagcatcatccaaagtactgggtttcatgcttccagaagggtgattatgtgccaatattacctgtgttgcattagccaataaggcagcttgtaatatcaacctcacatctacataagttgcagatattccaccttctgaaataggtactatacccagtactctgttagactgattaagcagtactactttaaagctttccttgtattctattgtatcatcagggaagtactttatcaatagttcataggcatcttgtgagctatttatcttgtatctagttgatgatttgacattgcttttatagctcaattgaacctctgctacattcattatactgtccataagatacactaattaatgaaccaactatattcattctcaccatataaagccttattaagtccttcagccaattgggtggcattaagtgacctgtccaagaagttgtcaatgtagctacttttattagctccagttagtaagttgtacacattccacatgctaatttccctgctgtccaaaagggtgctaaagttatcatcattataatatgctttggcaactaatcctatctgggtatcagtcattagcatctgtggtaacttcttcttctggtctacaggtaagaattgatataatctgcatctacctaagaattgtgcaaattgggactctctcatatagctatccttataagctgacatataatacaagtgttgggctatattgtactcttggaacagcctcaccactgcattgaatagttcagttgtactcataacctttaattctgacctgtaaccatctgttgatacacacatgttacagcagactaagtttttgaagccaatgaacaccttgaacttctctgcactcttcttgctgtacagattcatgtgattataagctcttactccacctatggttaaattcagtctgttacctgcaatatcctcatatatggtaggtatctcaaaacagaacatcattctctcaaagtagatggttttatcagattccagtagctgatttactggcttatgaatagcttccggtattctgcctttgataacatggcttaccctaatggcaggttcttctattctctcattggagaagactttattagctgcttcccatacagtttcaatgaaactggagtgtgatatagtaacctcattgtccttagaaaacacaggtgtaatacattcctctttgaggtactgcatggttacttcctttgtattagcttcaataaaaggtaacttattactttctctggtgcttatggaatcagcttctacaggatttgttgacataatacctgtgttgatgacttccattggctcaactatttgaacatgagagccttctttgttgattctattagggtatatcagattagctctgactggctgcaactgcattatttccatatctaatgtaattaggggtatagttaatagttggttgattcttttgtacctgaagtgctgctttcttctgcatgaattctgatgttaactgctgataccattcaggataagcatgatagatggcagtcagttcttcaatggttttactgctgttaatcttgctccttatcatctccagattgacaccatcattacaccaatctgctatgttctgtcctgtagtaggtgtaatggtaaagtcaggcttacctataaacaggtttgtcctgtctttggatgcaatagtctggtgcttcatattaatatcaaatactatggtaaattcataatctataccatctctcatgactgcttttagtcctactttctctggtatcatcttgccattcttctcacttagaacatagtcctgtttgcatctcatagtgcatataatatgcctattggattgtagaattttctgcatgaaagcattgattctgggtgtcaccttctgccaattagtgaagctgttaccttgtaatcctgcatggtattcaagcaagttatcccaacactgtgagatgctatcaattatgataacttccatacctgcaccttcacatatttcaatagcttgtatataagtttcaggtgtaaagttatcacttagacttaatacattataagcacctaagtgagcataaaggtcagcacttccattctcactgtcaataatggctatcttagtccagtcattacataaaccataagctaaaagcaatgcagaataggtcttacctgaacctgcacagccttgtaaagcaagcttaattttagcctgcttcttggatgaaactcttaaattcaacatatctgaataggattaattgttatacacagtctataaagaaaaaaggaagcaagtcctaataaacttgcctccttgaggtctacattgagacctgtcataaagttgctaatgtcatagctccaccttcacctctttgatgcagcatatagaacatatcacctgtatctggtgaacatacttgagagataacaggattggttacttctccattaagaaatttgtcacttgctgcacctatttcacagccataaacaaagaagcacttccctgtatgaggattttgctttacctcaatcttacttactcccttttgagccttgaactcattcactgtcactgtctctaagaactttaacttttccataatcttgtattttattgttgtgcagacagactattctgctgctgttgattcagttactatggtggggtaatgagctaactgtaatgagcttataatgtaaatccaatattccccaatatgcatagggggactatcccactcctaaggtaaggggagggagactttgtgacttagagtgcacttgtaagtatcaaattgaagaaaaaaataaaaaatttagaagtataatatatcaggtgacagtaagaagtgctatatattagttatgtacatataaagcaatcccctgccttctggtgggaaaacaggggatattggggtatgtatcattcattcatcattaatagtatcaaggtaatgcttgatttcatcatcatctggtacatgtgatataactttgtctatccaagtatcgtgacccaaatgagggtacagaaggactttagattccatgtgctcagtccatgctagtgccattggaacatcataagaagaccagattactttcttctcaatcaataagtctctatactttttatatgtattctttgccatatccaagtggctataaatggctttgtctgataggtctaccctgaactctttgttaacacaaaggcagtataaccctatcataactcctttctcttctggacttaaagagctgtcactgaataactctgcccatataattctgaaattcttaggaggattgggtagataatagatattccttctaatctctctttgctgctgtatagtctctactctatatcctttatcttctagctcctttagtctggggataaaggaatctttgatataatctgtacttactcctgtaagctctgacaactgactgatagtagtatctgttgtcatgtaattgctttccctttgaggataggcattaatatagagacctgctaataggtagagctgctttggattgaagtacctgcaagcttcaatggggatgatagtgaattgtttaactattgtcattaattctgattttataggggtcaaaatccaccccatactaattacctacagtaataaaggattaaaggtaattagtatagggtgatatttgaccctaaggttgcttctgttgatagctaatgtcatattagagatatatcactcctataaccatctgattatcaaatgtaaatatagtaaataaagtctataataccaatattcttatcatttatctgattgtatattaaccttctataacacaaataactttaacaagttattctctttggtagctatcctgccagtatgttctttaaaacctcttggattctctcctctgatggtgtacttattcccagatgtcctgtcagtggcatatatgcttttcaataaggctacatactttctaggtttcagtaccttatgtagatgatactggactataggagctaatatctcttgtatctcacttgctgaatagctcttatttaaggtgaaacttcttcttattgcaaccttgaaaggatgctcttcatctagtgcccaatacataactgcattattgagattcttgtaagctatattgttacttgttctaatctcccatagctgatgtagcaaactatcaaggtcaacatatttgtagagcttaatgaatctctctaagaatatctttgtcctgcttctactttgcctaatgtataagtgcaaagtattgtcattcaactgccctgtggttgataatactttgatgttatctatggcttcttgaatgtaactatctgtcaacttattctgtgcatccttattggttttctctatgctgttttgctctggagaaacaccataaggtagggatttataactaatgatgttaacctgtttacctagtacttctttcaaggtttcaggcataaaatatgaggcatataagtcgattctttcaatgatgtaatctatattgaggtaggcaggtacattctttccatatatatcctttctagtcaagttaattaactcattccctgcaattctttcttgcgctttctctcttatggcttctttgattattgcaaatagatcagccaaggtataatccccctgtgagatagtatctgctgattcaagtactttgagtaccttttgggctttgtttaatagagtggcagtgtccttttccatactttccattactgatacatatcctaaggtgttatatatgatagtttcacttagtattccattatcctttctgcatctaccatgtatttgtgtcattctatctaaggtcaacattgagtgacttcttcttacatctgatacagtgattagatggtaactatcctctatatctataccagtgaagtagcaacaggtggcaaagttaatcctagcaggtaaggtatcattgtctcctagtttaggtgcaaagtattctcctgcttcctttatggatacctcactacataggatagcacattcctttctggtttcttcatctagtgatgctataatgtttcttatctggagtatggagttataggcaatgaacaccttctctgtaggatgggagataaccttttctatgacagcctgtgtgacattatctgtatgtagtaagtctatatttctatgggtattgtatttccatgttataggaaatctacattcagtctttaagtgtggattgctgaactccttcatagtagctgttaccatacatctgttctttaatgggaacataaggtagtagtcaatcacattctccaattggggtctgaagttgttgtcagtctggagaacatcaatctcatcaaccataaggaaatagtctttgtagttctcttttcctatgatacctaatagtctacctagactgtctgcaactactagaagtttcttgtatccatcttttgctaggtattcctcaatctgctgattagttaccttttccttttcacctttaatctcactacctacatataatgtattaggatgctttgagtgtttaccataagccagagccttagtaggaaagactatgattgaatttctctttgagtttatctcaagggtagtagctccaatgccgggtatcttcttgtctataataccatgaggcatcttatctatgaagtcagccagattccagaaggagtcaccaacttcttctcttattacttctggttctctgccaaatagcaagttatccaaactagttattactgtatcttgaggtatggttttagtttctcctactttcccagaggataatatctcaatgtactctacaggtgcatcatgtaagtcaccataagtattaggtactgtctcttctaattggttttcaactatggaagatttaacctctttagagtgctcttctgatacaggagtagtgcctaatgttataacttctgacaggttggtcttctcatcaggaatctggagattgtataactcatctatgaagctactatcaagtcctgctatttcctttgccagttcatcttctatgctcatgtctcacttagtttgtagttagtatatagattgtaagtgaacaaatatactaaagagcctccataattcaatcaattacagaggttcttttatgttaaacttacttcacttctggactaggcagctcactataactaccaaatacatactcaaccaccttcttgttagcttcattctctatcttgaagtctctttcaatatagatgtcagtgactttcatagcctcatcaatatgatttaaggcagcatgaactgtatacttatctatacctactttattaacagctaatgtagcccatgagtgccttgcagcatagtattccaaatcatccactttcagtattttgccaatttgctttaacccaagattgatggctctgttgaagttcttgaaagtagaatagagatgatagaaacagaataccttcttctgggtgtaatcttcatatttcttcattaaaggtagtaagacaggaagaacatctactttcatcttagctttatcaagtcttctgtctgtagtcttagtcctgtaataggtaattgaaccatcttccatttcagtacagttgtacaagtcagcagaattcatccctattaggcagaaagagaggataaagcaatccttagctaggttaaaggggcataacctttctctaccattagcattaatgatataaggtaattcccatatcttcttaattaactctgctgataatgctctcttcctagttgcttcctgctttggtatcaccaagttctcaaaaggtgagttaggtatcctaatgagattcctgtcataatcattgtacttcttcttagcttcgttgaatagatgtctgatgctactagtgtacagtgataccattctgttagagggtattctctttcctttcttctgaagttctgccacctgtttagcccttttcttgtgaaggtattccatgaactccatcattaacaacttggtaacttggttagtatttaatttgtcctttcctaagaaggcaatgaaggcattgagggcagtttgataatttctcttacccttgacctctgtagctgccaaccagtctttgcagaactggataaagtcaataggagtattcttttccttctctttctggatataatcaagtacatcacttaaggttaaattggaagcctccaatggaagccccatgcataactcttcatagtatctgaccaatctgtcagcttccttgatgtactttggattctttaacttgaagtccttagtcaggtcttctgctcttacaaagatatgagtagccaacctcttaacctctctgttgtaggttagcctaatttttacgttataagttttatcaactttttgcttagattttaagacttcagctttgatagtcaacatgttacattggtttattaggaacaacaatagaccaacaactatactttaaaaggggatatttaacctaaattttgtacctaaagactagcactaaaacaaaagaatccctcaataatctactgattatcaagggattcaactgtgaccccggtgcgattcaaacgcacgaccttcagaaccggaatctgacgctctattcactaagctacggggccattctttctaaatgcgaggacaaaagtataaaaaatcttctcatcttcctaatgattctcctttttttatagttcttaaggtacttccctatattagaagactgttattttgaaatgctttagagcatttactttatcaaattgacaatcttttagagaatatccattacatatatcaattttattcctatctttgccgacaattaacatttaacaaacctatgagttacttgataaaacctaagaactataagccgctactcgacctcaaacagaccgagctgggaatcaagcaaataaaagagttcttccaattaaacttgtcatccgaactacgccttagacgtgtgactgcccctcttttcgtattgaaaggaatgggtatcaatgatgatttgaatggaatagaacgacctgtttctttcccaatcaaagatctgggcgatgcgcaagccgaagtggttcattcattggctaaatggaaaaggttgaccttagctgactatcacatcgaaccgggatatggtatttatacggatatgaatgctattcggtcagacgaagaactgggcaatctgcattctctctacgtagaccagtgggactgggaacgtgttatcaccaatgaagaccggactgtgaacttcctaaaggaaatcgtcaaccgtatttatgcggctatgatccgtacagaatatatggtatatgaaatgtatccgcaaatcaaaccttgcctgccacaaaagctacatttcattcattcagaggaattgcgccagctttatccgaacctggaacctaaatgtcgcgaacatgccatctgtcagaaatatggagctgtgtttatcataggaataggctgtcaacttggtgatggcaagaagcacgacggacgtgcaccggactatgacgactacactaccaaaggactgaacgacctgcccggactaaacggcgacctcctattgtgggacaatgtactgcaacgctccatcgaattatcatcgatgggaatccgtgtagacaaagaagccttgcaacgtcagttaaaagaagaaaaagaagaaaaaagactggaactttatttccacaagcgattgatgaatgacacccttcccctgtctatcggaggaggtatcggacaatcccgcttgtgtatgttctaccttcgcaaagctcacatcggagaaatacaagccagcatctggcccgaagatatgcgcaaggaatgtgaagaacttgaaatacaccttatataacaaactatgaatgtacaaattgaagaaagctggaaagcacatttagaacccgaattcgaaaaagactactttcgcacactgaccgatttcgtcaaaagcgaatatagccagtatcagatcttccctccgggaaaactgatcttcaatgctttcaacctttgtcctttcgacaaagtgaaagttgtaattataggacaagatccttaccatggaccgggacaagcgcatggtctctgtttctctgtaaacgacggagtgccttttcccccttcattagtgaatatattcaaagaaatcaaagccgacatcggcacagatgcccctgctacgggaaatctgactcgctgggcagaacagggagtattgttgctcaacgctacgctgaccgtacgtgctcaccaagctggttcacaccagaaccgtggctgggaaacatttactgatgctgcaatccgtgccctggcagaagaaaaagaaaacctggtatttatcctgtggggatcatacgctcaaaagaaaggagcgtttatcgaccgcaacaaacacttggtactcacttccgcccatccctctcctctttctgcttacaacggcttcttcggaaacaaacatttcagccgtacaaacgactacctgaaaacccatggaaaaacagaaatcgcatggtagttggagaagttgagaatggagagttgagagttaagaataaagagtaaagagtaaaaaaaatggctgcactattcgtcgaatgatagcgcagccatttttcttttctatattgtagcaaaacaattacacgtccgaatttccactctcaactctccactctcaacttatcctagtaccactgaatgttactttgcgtttggcttctctgctcatacttcaagtcttgcaggatgcttgcattcgcacggatggtaacattgtaatatttccagcgtccgaaaggagaaagactggcggacaggttgaaacagtgcaagtcacgggagattgtacaagaagtctgcgtaatctcttttgcctgaaaatcatagcccgagttgaacgagagcgaccagttattagaaatctttatatttccgtttgcattgatgttatgcgtatacgtataaggatatcgcatggaataacggttaataggcttagacctatcttcacggatattaaacgaatagctaaggcttaacgaccaaggcatcttaaacacctgataaccatccgggtctgcctgtgctttctctactttcttaggtgtagtaccatctccttccgttccgtcagattcttcatcgtcactatcctccgacttcttatcttttcctttttcatcctcctctttcggaccgaaccatttcttccatgtgtcattattaaaggtatagttgaaagaagaaccatatccttggaaacgcccaaaacgaccatacgaccattctgtacggttactggtcactacattaccgcttttatcgaatgtataagcatacgtagcgaattgggcattcatattgaaagtataattcttggtcagtttcagacggaggttcatacttaagtcactccacggtctttcctttgccgccatattataggacatattggcactcaaatcatcaataaggctaactttcttgactgtatcattctttgcgtcataatacttcatctccaagttattagctatcgagaaactaaccgttcccgacccctcacgagaaggcacgccataaggctgattggtaaaaggagaataatattgtgtattaccattataatcggtatattcttcccagtacttgccaaatcccggagcaccactcaaactcacctgcggtgtgaatacgtgacgaatctgtatctccttcttcttcgcaaagatcggtttatacataccatacaatttcgtacttagagccaaactagccgagtaattggatacacgataaaagccgttaagagaatcgcccggcaatgattccagcctgtgagtatcttcgttataatgctgattgattttacgggtgtaccatcgttctgtataattcacagaaggattgacctgcaaatatttgaacagcgtaaaagtagcactgataggaatgttatggttcatcgcattctcccatgagcttagtccggctttgaacaaatggtcatctttagtacggatactgtttgtcagacgtcccgtataaccaatggaaatcttctcgtaccaacgttcggctcctgccgctttcttgcgcttgaacggaaacagacggctcaacgtaatattcaagtcaggcaaagtgaccgcaatagaagagtcacgcattgtctgtgcgatattggtagttccggataaggtcagaccgatatcgggaaaactacgagaataactaatacttgatgttttggtattttgagtcaacaactgcgaattataaaggttgttgatattagaacgttcataactactggtcgagaagttcacactggcagagaatgtagtgttcggactggctttagcatcctgtcgatggttccataccaccttaaagtccttagcaactgtatagtccggcatccctttatctccagtcttggtgacctgatagtccgcttgcagcgtaccggaatatttatagcgtttattatagtttgtcaatccagacaatctccatgaacctttcgtgaagatatctcccgttattttcaagtccatgatatcactcatggcaaagtaatatcctccttctgccaaaccgaaaccacgactggagtcatccatataagtcggcataatgaaaccggaagagtaactgctggagaatgggaagaagaagaacggcacagccaacggcagaggcacatcttccacaaccagataggcaggtcctgtcactacattctttttagggcgcaccttagctctcgtcagctgcatatagaagtggggatgatcgtgatgatcgcaggttgtataacgcccatgctccatgaaaatttcatcattggcccctttcttcgccttgcttccggtcacatatccttctccctgctgggtgacgatatcagtaattcccgctttcttggttttgaagttatatcggattgtttccgtatcatacgaggtatcaccttctttaaataccggtttacctttttccactccggtagtatccttgataccataagcatgcacagtactactatccagattcatcgaaataacttccgcagccagttcgatgttctgataattcacttttccgctaccataaagtgtagcggctcctcccaaagtaaagacagtggagtcgttggattcataaacaaccggtgcatcgagtggttgtttcttctttaccggtgcgatggaatcaatgcgtaccgttaccgtatctgctttcaacgaatcatttccctgaagggaatccgtttgtgcggtattggaggcaatcattcctcttcttcgacgctgagacgtagcctcatcgggaagcatcagtaagacaatcagcagtatgaatgatataagtatttttgctttcaatggcgccattaactaatagtttacgcttgaagtggcaaaagtacacaatcttcaccaaatatgagttagaatcttcgttatttaattattttttagtgctataaaaagagagaacaccatctatcaaagcggcttaggccttcttcaccatattttgcaatactttgccgcgctttttccacagttttctcttcatccagatgggttttagaaaagaatttatccgcaaagcaaatcaattgctcttccagggtaatgggcagcatctcacgatgaggaacggggagctgctgggcaatgatatcttccaacgagagtccggctcccgtatggcgttcgcacaccaatgcgtgttgggggaaaccttccgcccgcaagatttcagctcccaaatatccgtgggcgatataaggatgagtgccaaagcactgaatggtgggagcatcggtctgaaaaattccaatatcatgcaacagagcagcttctttcacaaaactccggtttaaacgcaattcgggatgagcatccagcattttcattgcctttccggacaccgccagactatgaattactaagatttgtctctgctgcgtattttccggataatatttatcaatgatttcgtatggattcatgtgctttattttttgctctcttgatgagaaattaatatttttgtgcaatattacaaaaaaaattaccgatatgcaaactcgagcttccttcattcttatatttctattcattatgttgtcaccaatgcgtgtaagcagtcaaattgtcacgggagcagaacaaatggatcaatatatgccgttgctgaaaggaaaacgcatcggaatggtagtcaaccacacttctgtcgtgggagcaaagcgggttcatcttctcgataccttattaaggagagacgtccgggtagtcaaagcatttgcccccgaacatggtttccgcggtaacgcggatgcaggtgaaacggtgaaagacggaaaagattcccgcaccagtattcctatcgtatcgctttatggtgataacaaaaagccgtctgccacccaactaaaagatgttgacgtgatcttattcgacattcaggatgtaggggcacgcttttatacctatataagcacgatgtattatgtgatggatgcttgtgcagagaacaagaaagaaatgattgtactggatcgccccaatccgtgcgactatgtggatggtccgatactcaaacctgcttaccggagctttgtcggcatgcttcccattcctgtacttcacggatgtactatcggcgaactggcacagatgataaacggggaaggatggattgccaacaagaaaaatccttgttcattaaaggtaattccaatgaccgggtggaaacatggagagccttattcactccccatcaaaccgtcgcccaacctcccgaacgatcagtctatccgattgtatgcttcactctgtccttttgaagctacccgcgtcagcgtgggacggggaacaacttttcctttccaagtattaggcacacctaataagaaatacggaagtttcacttttactccccgctccttacccggttttgacaaaaacccgatgcacaaaggtatcacctgctatggggaagacctccggaatgtaaccgatgtgaacggatttacactccgctacttcttgaacttttatcgcttatccggtgaaagcgcagccttcttctcccgtgcccgatggtttgatttgctgatgggaactgacagcgtacgcaaggctatcctcaaaggagaatcggaagaggctatccggaatagttggcaaaaggagttacaggattacaaagagattagaaaaaaacatcttctctatgagtaaaaaactagtatcatactctcattcatttttataaaccacttataattaaaagaataagtatgatagatacccatatttcatgaagaaagtatgatagatacaaaatttcagaaacatctatcattcttattcatcagataataactatattagcaaaaagaatgagagttatgatagttattttctactctaagaacaatcagttaataacacaataatgaaagataaaacacaaaaaagtttcaggggaatagtccggatattacttcttgttttctgttatacctttggtagtcatgcttttgcattggctttagagcacgaacaaacagtagatatttataaagtaacagatgtccccaatccgcgtaatgaaagctcttccaattgggtcagcaatccgaatcagatattggatgaaagttatgtgtgggaaataaataatatgttgtcacagttagaagattcattgagtattgaagtgacagttgttgcactcccttctatcggtgaagatattccggcagagtttgcccacaagctttttgaacactggggcatcggaaagaaaacggacgacaacggattactgattcttttagtgctcgatcaacgtaaagtcactttcgcaaccggatacggtttggaaggagtacttcccgacgctttatgctttcgcattcaacagaatgaaatggttccgtggtttagaaaaaacgactttgacagaggaataacagagggagtccgggctgtaacattggtgctttatggaagcgactatgagcccgtttctcaaggcacttctgataattactggaaaagtgccagcaatacgttgtggaattttctggcaaatcaaccgctcatgctttggatattcttgatactggtaaatgttctcacttatcgcatgaaagtaaacaaagctcgccccaaagacagttcagcattagcagcaatcaaagtcctgacacattacagcccacttggatgtcttgtattgttttttccggtctggcctgcacttattgcggcatccttatggtacaagttctaccaaaaacaacgtgttattttgcagagtaaaacctgcgattcttgcaaagctgtggctttacaacttttacccaatgagcttgcaacccctttattatctgcttccgaacaaatggaacacaaactaggttctgctatccaccgtatttatcaatgtacttcctgcggctggcttttacggtataaatctatcaccataagcgaatataggatgtgtaatcaatgccataccattgcttccaagcgtatcagcccgtggaaaacaattaaagagcccacatattccgatgccggattggaggttgccgactatctttgcctgatgtgcggagataaaaagcagacaacacagaagatcccccgcaagacaccccccaatagtgacagttctagtaatagtcacagtagtagtggcagaagcagtagtagaagtagtagcggcagttttggtggtggacatagcggtggcggtggagcgtcaagtagtttttaagatcaactatccatccgaagaagtcgactaaccaaataaaggacatgaaaacacatctcacctgaatattttcatagaaagatggttgtccactcccttattctaactatttttgcatagataaccgaacataaaaaagtgaaatgaatatagaagaatttagagaatattgtctgtcttttaaaggagttcacgagaagatgccttttcccaatgtacccgaccaatatagccgtgacgttctatgcttttatgttgcggacaaatggttttgtttcgttaacattgagattttcgatttttgttgcatcaaatgtaaccctgacgaatctggagaactgcaaactgaatatgccggtataaaaccaggctggcacatgaataagaaatattggatcagcgtttatttcaatcaagacgtatctgatgataagatcaaagaactcgtaagcaaatcctatgatattgtagtcaaaagtctgacaaagaaagaacgggtttctgtttgagattgcaaaaagtcttccagtgctttcaggtcttttatttcaaatattctttccatcgttttcattttcagctccgatgtcttgtgttggggaatgttttacatttttcacagcgtgcactattcaattgcgctcccagacaaggatttttttgccgtgtataggtaggacacccaccacaaaacacgccacatgccgggacacgaccattataaattttcatcatacaaggcttttggccatccaatagttagtaagagacagctgattagccctgcgtttttgctctacttctactatataccctcgcttttcaaaaaatggacgggctgttatactcacttcagaggtaatccgcgtaatcccggctgcgacggcataacgttctatctcattcaacaatagtgtagcaacacctttgccctgaaaatccttatgaataaacattgaatgcaaatagccctgaggtgtaatggatgaaaaaccgacgatttcagattgccgattaacagcaacaataaaatagtgagtttttatcataccctctattttagaaggatcatctccgcacgatgcccaatcttcaacctcggcctgtgaatagtcacgcctgtttatcactaacactgtgtttcgatatagagactgaatttcctctatatccgtatttaaagctatccttatagtaatcatataatccctaattattcactattttatctctttctcttttccacaactgccacgaattgattatattctgccacatattatatattgattagcatatataattgattatcaggaaagaagcccacctattactaacagtgggtaacaaaatagtaacaaaaaaaacgaagaaattcgctttgtggtgggcttcttatgcaaaggtaacaaaaggcaattacctgccaaaaaagaaataaggcttttgctttacaatagctttttcaagtcctcaatgtcgggcagagcgttacgaagtcgttccggcatatctttagatgcacgataagtagcaactcccatcggcttgttataatcacgaacggcaaactctacaaaggtttgattcatttccctgcaaagaattatccctatagagggattctcgtgcggctttctgatatatgtatctaaagcggataaataagtattcaactgccccaaataagatgtacggaattttccggatttcaactcgaccgcgaccagggaattaagctctcgattgaaaaagagcaaatcaatgaacatttcttcccctgcaacctccatacgatattgattgcctataaaactgaaatcttgcccaaaggtcatgatgaacttcttcacgttggcaacaatcgccttttctactatcttttcatctaaatcctcttcttgttcatccagttcctccacattaatgaaatcaagcaggtattcatctttgaatgaacaaacagcttttagagcttgcttagtatcaggcaatgtttgtgcgaaattattaggcaaagttccccgatggctgtataggtctgcttttaagtaatcccttaaagtgtatttactccaataacgagtagcgcactcatgtatataaaatagccttgcttccaaagtcttagctttggatattatttcggtatgatgactaaagccgattgaaaggaagtctgaccagttaaattcatcagccagtggctgatgaatttctacaagaagcaatttttcattcaacaccaaatcatcagccaacggcggatgatttaaaaccttatcccactcctcataaaaaatacgcatatttcttatgcttgttgctgaaaatccccttagccccggcaattctttctgcaacaaagaagatatttgttcaattgcacctttcccccaaaagcctgtacgagaattttccgacacataacgtccgatgccgtaataaagagatagctgttccttgttcaccgatacggctgcacggtactggctgcgtaggatagcttcttttatggtctttactgcttctctataactctgatttatatccatttgcgatttattatatgcgacaaaagtacaaaaatagtgctgtcagtacaaataagtttagtccgttttggatatatagacaaaggaacgtactaaacttaatctgtaacctttttattataatactccaaaaacgctacttcgcctatctcacttaacagtttctgattttcaataaaattctgtccatacttcaaccaacgcttagtaaagcctttaaatctggcacatgggaagctgctgcattggaaacaatgtgttatctctttctccaaacaacataaatgaaatgttttgcatttttcacagcgagaactattcagttcggctcctttacagggatttttctctcttgtatacgtaggacatcccccgcagaacacaccgcaggcaggaatacgtccctcataacgttggattttagttacttcccttgccatccaaaaattagtaagagaaagctgattcgccttgcgcttttgctcttcctctactacataaccttttttttcaaagaaagggcgagcagtcaaactcacttcggatgtaatccgcataatcccggctgtaattgcataccgttctatttcttccaaaagcatcgtagcaatacctttaccttgaaagtccttgtgaacaaacatagaatgtaaatagccatgaggcgtaatagatgaaaaaccaacgatttgtgactgttgattaacagctacaataaaatagtgggtctttatcatctcttcaatgttagaaaggtcatctccgcaggatgcccaatcctcaacttctacctgcgagtaatcgcgtctatttatcacgataactgtattttgaaataactcttttagttcaaccgcatccgactgttgagcttgcctgattgtaaaatccgttttcatatctattatattaaattctttccagcctttcttattttgtagctattatagaatagaccatcggaatatgattactcaaatgttttatcctatatttgttaggttcacattcaactgtttgggaaaaacaattatagggtgaataatcaaattcatcaaaagaagatatggtaagcccactttgtataaggctatttataacctccctcaaactatgattccacgttacacattcttgcaacaaatcattttccccgtccgtataggttccctcttgtgtttctctgattgcaccggaattgaagtagttatattcaatccttttaaagtcatcatcaaacatccacacaatcggatgaaactccacaaatacaaacttcccatttggttttagataatttgaaataatctgagcccacttattcatatccggcaaccagccaatcactccatagcttgtaaatatgatgtcgaattgttcattcaaatgagcaggcaaatcataaatatcacagcagataaaagttgcattaacatttgctttcccggctaatatctttgcatggtcaatcgctttatcggataaatcaacacctgtaacatttgcgccaagtctacccaacgaaatagtatcttgtccgaaatggcattgtaaatgcagaatagatttcccttttatatctccaagtaaaccaagttctatatcattgagagacgactcacctttcaaaaagccttcgacatcgtaaaagtcagatttcaaatgcacatctaccctgttgttccaagacttccggtttatttctaaataatcaaaatcttcattcattcttttaatattaaattgattatatgcaaatatagcaaaaggtacagtatcattcattgtgaattgtactttttactgtatttcagccaaatacctctctttacaggctaaaacctttgctccttttctgctcctctttcggttgtatcctttgatagagtttgctaaactgctccctgaaccaatcggaaacattttttcgattgatgattagcaccaatttgttctttccaacagttgaagctgttactatttgtgcagtcaccttatccgttacgaaattccgtttatactcttcggaatagagtgtgccattatgttctatcttttcccctaacatcagttttgctgtttgttcagttgagaaaccgacaacacgacatagcctttccattcggaaaagttcttttagtagtggtagccatgcacaagcctttttaatcatctgtgacagccgtgatatctcctttcgggtttcatccagttccttgatgtgcttaccctgcacttttaccaattccctgctgtactgttcccgttgcttctgcatcataatttgcagtctttcgatgctctcgtcacgagcaacaacttcatcacgaagctgctggttctcctgtttcagttctttgatttctccactgcccaaaagagaacctacctttgcgataatggcggttttagcttctgtcttaaccacttccagccgttctgtgccgatttctcttttgatttgtagtagtcgtttctccgctgctttcttttcggattggagttgctgcacgtctgtttcgagttcacccgtctgtcgtttcaaatcgcggtaatattgggctgtagtggtatgtctggcttccgatccacgtacaccacgctgcaaaccgtatctctccataactttagcgtaatcatcatgataggctaccaacctatcacggttcaacacatcatctgcacacaatcgggctgcatcggttttcttgcgataggtacgttttccctccgtttgctttttctgcttcgcctttctgcgctcacccattactatcggcacaatggtagcatgtatgtgcggtgtggtttcgtccatgtgaagaactgcggaaacggtgttctcctttccgaaagtcttgtgcaaccattgcatactatcgtcacaccattcatctatacgtccgtcctgttgtatcttcatcatgtcctcgtgcgttcccgacagcataacacgaatagcccttacttggtcaggcgtaattttgcgcttgatgcctgccgacttgatgcggtgggctatcgcttcgtcacgttccgttactcctttgggaagttgtacaagttcccgattgagatgcgttcgtgtggggtcaacgttagacgctatcacccggcgttcaatgtggtcggacatccgggcatcggatgcgccttttgctttcttgaaatcaagggtaaaatatcccatattgaattacattttttcgttagacaattccgcttgccttgcatacgtgccgcatggctcacggggtttcaaaaggggcatcgcccctttgctcgatagggtgtttttagcggtgcttgcactgcgttaagaaaacgccctattgagctatggcttttctttacttaaaagcctgtgggtgcgtgcggcggttacatcctaaaacctttgcctttcttcttggttggttgctgcacctgcctttcggtctgttttgtcggttgtgggaactctaacgactgcgacaatttcttacccgtaagatagtcgttcaaatctttatagttactgtagatacgagaagaatctcggacacgccagccgtattcccgatgcaattcctgcacggctttcattcctgccgcatcgttatcgaaaaagcaatgtatatgttcataattccctaacgggtacaacgctttagagagattggaaacggagttcaaaatgatgtagtcttgcttgtcaaggtcgggataggtaagacaggatttctgccgtagggtcagaaaagaaagataatccataaatccctcgaacatgtagcaggtttctctcggctctcccttctgtcgtatataagtgatgtctttgggtgcgatacaacctttaaaatacttgttgcgtacctcgtacccacccgaagcattcggaaaaccaacagcaaagaactgtttgccattattcacaaaacggacttccttacattctctttttgccagttccgtatttatccccctctcctgcaagtaagaatacaaggcaggagaagaaagcggcacaacttccaactgctgaaaactcggctgtgtagaagattgctgccgaaaagagaaagaaacaggacggacgtgtaatgcctgctgcgcaatcttatctaaaaggtacggcacactgtcggatgcgtagagttcttgcgccaatgcaatgatgttgccacctttgcctaatccgaaatcataccacaaattgcggtcaggattcactttgaaagagggttctttctcttccctgaatggtgatttataccaaagactgctgccttgttgtttcacgggattatatcccaaactgtgcaaatagtctgccaactttatatttttggattcttcgattgtcataatctaaatgtattgatgattgaataattgaaacaaattccgtttagtccgctatatatacgcctgaactgtactaaacttactttgtacttacagtatcaaaagaagttcattcctcttatatatacacacggactaaaccaaacctattgttagtagtggaaatcagggttatacttataacctttaccctcttttacaagcattcgcttgtttacaagaaacttattcagcttcacaagcacattgcgcccacgttcaaaaccgatacttgcgtaaccctcctttaaggcagctatcactttaggataaccttgtatcacttgtttaccaaagccgttagtcaatgcttcacggtgttgtagctcggtcaactctgtaagcggaaaactacggtcttgcttgggctgttcaaaaatgtaatcttccgctatttcaggaagcgcactatcattaatacgaaatgcaaacggctcgaaatctttatcacggatatgcatcgcttttacttcactgatatttacgtcttgagtgcttttagtaacctgcaagaccgtttcagccttattgttaagctccgtaccaatatgccctcgcgtattgtcatcccctttgttcagatgcaagacagtgtgaatatgtagattgtattcactcgaccacttcatcaagagatttatcagttcggatgattcgctcggactattgatgtcatacatcaagtcacgtatgccatctatgataacaagtcctatatcttccatattggcaagcatatagtcgattatctgcttacgcttatccggtgtacattcccgcaagacgacaaaaataaaatcatccctgtctttatcggtgggaagacctgccaaacgcataatacgttccattaccttgtgacagtggtatttactctgttcggtatctacataaagaattttacgtttattttccggtaggaaagccgaatattgcagaacttcgtcattcttcaacgctgccgccacaatggcggaaacgttgaatgtctttttactctttgccttacctgtagatgcactgaaatttcccaatgtgccgatagtagagccatttacccaaagtatttcgggcggtacatcgtaagtgtcggttatctttagatgaatggttttccaaaggacagcaaaatcttccctcgtcatcttttgcgtttccgttcctttcttgttttccatagacttacttttttaagggacggttaagaacatacttctgcgcttcctgttctatctgcgcttgtgtctttacaggattttgacgtagccacgcttccaactctgctttctcaaaataaagcatcttgccctgcggtttgtagtgcggtatcaggttacccgaagtcagtttatacaggtaacttttggaaaggtttaaaaacttgcttgcttcctcgaaactaagcacgttttttgaaaggaacactaaattttcgagttcttcaactcgcatctcaatactcttactcatactatataagtatttgcgtgaaacaatatggagtgcatgccctccgtttacttgtaatcgattacgggggcaaaagtattgagtaatagcttgatagcggattaagttatgtttgaggtcttaacctgttcttaaagttttttcagttgtttgatatacttgtctatgattgcatatcctttcacatggtctatgtctttcacataattcgtagctgtggctaaatcaccttgattgaggtatttatccctacttttgtctttggaaagaaagagtttatggttggcaataaccgattgccaattgggggtaatcaggttgcgatagctcaactctgaaaaaagaaaagcgagatacctgttattattagacctgaatatgactttgggcttgcaagagagtatcgctttcaggtcgtcagaagttacgggggcattgaacatcttaacctcattcatacattccgcaatcaattctatctgaccgtcattaagaattgattcaaactgattttccgtttcagcgacgggaggtacggctattactggagaaacgatagttggctccggattcagttctacctgttcctgttgcggctgtgtttctacctgcgctctatcctctttcttttttcgcaagtatgccgaatatctttccaacacaacagcttttactgtcatggagaaataaggtagttcttcatcgtaaactgtattatcctgcgcatattgggaataattgaacgaaagaggagagaatgaaagatattttcttttttcatcaggcttcaaggcttcataaaaaccgctttcccaaaagaaatcgggtacagagtagaaattttggatgtcattcagtgctgaataacggatatatagttgcgctaattcattaacagcatgtatatattcctgacgttccagttcatcagcctgttctccattcaagtatcgaaccttgacgatgatactgtctatcaaaatttggcaggcatagtttatgcaacggttgaatatgccttgtatataatcgaattttactttcagttcttcttctgtcataatatgctctgtttcagttagtagcggcaaagatatatttttccagtaaaacataggcaaaaaaagaaagaaagtgcggctatcagcgttccgtactttctttctttttaaattaatccgttaagtttggtatcaaacttatcgcttcttctttctttttatctacaatcttggcataaatttgagttgtagcaatgttcttatgccccaataacttgctaactgtgtataaatctgcacctaatgttaacatcatggtagcgtgggtatgtcttgcaacatgaaatgagatatgcttagttactcctgctgctttcgcccatttttgaagtatattatttatagtaccctcatgtgtcaaagggaaaataaaatcatcatctttcgcttccccccgctgtggcagccactttaaggcttcatcagatataggcaagtaaagcggctctttggttttctgcatctttatttcaattctaatcctttcaccgcttttctgtaaatcactccatttcaactttcttatgtcgcttacccgtaatccacacaaacaactgaaaagaaaggcttgcttcattatctcatacttacattcagtagctataagcagtttcagttcttctatcgtcagatactccctacggctcgcttccgcttttaccttatcggcaaagttaaattccttagtaggattaatggttataattccttctttaaatgctttattcagagcggtgcgcaatactccgtaataagcgactaccgaattattacttaacactcctcctgcttttgccaatccgtatttgcttgctttcttggcttgttttaagaaatccacaaagttactaaggaaatctttgtctatatcacggaaagcgatatagtcccctctgaatagtttcaattcacggatagtgttaccaatagtcttttcataattcaagctaccacgctctttagattggtttctcatgttcaccaaatagtcaattacattcgcttttgacttattagtgttctgaaatccatgcgcatcattctgtagctctactatccgcttgctttgaatcgctttggcaagagccagcgtagtttcattctttgccttatcttcccttgtcttttcaggaataagatagagtttcaaaaactcatactgacgcttaccgccaacatagttttctttccgaataacatcacctgtgtaatagtccaaatatatagactggttaccattggcaagttgcttaaaccggattcttacaggctccttcaatttagcctcttgtttcttcttcgccatacttatgtttttattttgttaccgatggcaaatatagatattttttttgttactcaatgctattcaagtaacaaactggtaacaaaataaacgcatttattggaataagcaggaaaataggaaaaacaaaggaaaagttgggtacaaatagcaaacacctaaatatcaatagattatattcattattttatctcattctttctctttttccacaactgccagctattaataatattctgccacaacacatacgaaccgggagccacagaagacaatggattcaaataggtatgcgccatccaaatagccagaattgtattcttttgtccaagtgcttgcccaccactgatacggtcattataaatcgagccgattgtcttccccaaaaagaactgcaaacaacaggcaatcagtgctccgacagcaatcatgatttccgtaaaaccatccgccgggtcattgagcaaagaatacaatgtttgcgcagttacgatagctaaagatacagcccacaaataaaaagcaagttcatgataacccaataacttctgatgtactttcggcaaacacttgctcaacaaccaggcaaccaaaaaaggacaaattaacaacggaaataccttacccaaaataacaagaaatgcctcccaaaaagtgacatcaggatggacctccaccaaaggaaaaagaatgggcacagcaatagccgctccaatatttgctatcaatgtataagtagtcagactagccgcactccctcccaacttggaagtaatcaccgcagcagccgtagccgttggacaaataatgcaaaccatcactccttctgctacaattttatcaaagcgataaagcaacagataagcagccaacgctccaccaatctgaatcaataacaaccacatatgaagaggttttagcttcaaatcacgaggagataccttacagaaggtcaatagcaacatcgtaaaaataagataaggagtcaggaaagaaagactgataaacagtggataacccacagcacctaccagcatagcaataggtaacgtccaattcttcaaaaacttaagcatcgtcgtacattttaacttcgaagcacaaagtaacggagatttagggaaaaaagctatcattaaaccgaaaaaaacacaaaacttaatggcaaatcatgagttttctacaaatttctactacatttgcaccgtattatagatatgaaactgaatagaccgtacatattatacatatttatttgcctctggctactttttctaccctcatgtaccaaccacttatgggggaaggatttcgtagtagttattgacgccggacatggtggacatgatcctggtgctataggcaaaatctcgaaagagaaaaatatcaatttgaacgttgccctgaaagtgggaaatctaatcaagagaaactgcgacgacgtcaaagtgatctacacccgtagcaaagatgtctttattcctttggaccgacgggcagaaattgcaaacaacgcaaaggcggatctctttatttccattcacaccaacgcgctggcaaacaaccgtacagccaaaggggcttcaacctggacgctgggtttggccaaatcagacgctaacctggaagttgccaagcgggagaactccgttatcctctacgaaagtgattataaaacaagatatgccggtttcaatccgaactctgccgaatcatatattatatttgagttcatgcaggacaaatatatggagcagagcgtacacttggcctcgctgatgcaaaaacagttccaccaaacctgtaaacgggcagaccggggagtgcatcaagctggattcctcgtcttaaaagcaagtgcgatgccaagcattcttatagaattaggatttatttctactccggaagaagaacgctatctgaattccgaagaagggaccggaagtatggccaaaggtatttaccgggctttcctgaattacaagcgagaacatgagttacgccttacgggagtcagcaaaacgaatctcccaaccgagcaggaagaggacaacgccccgaaaattgcccaaaaggatactgaaagcataaacacagctcctcaacagcaagaattactagccgaagcaaaaaccaaaccagctgcaacagcaaaaacagcaccaaagcgcccaattgtggcagaaagcgcaaccaatgacagtgaaattacgtttaagatacagatactcactgcttccaagcctctcgccaaaaacgacaaacggctgaaaggactgaaagacgtagattattataaggaagggggaatatacaaatatacgtatggagccgccgccgattacaacaaagtgttgcgtacaaagcgcaccattacggcacaattcaaagacgccttcatcgtcgctttccggaacggtgagaaaatgaacgtcaatgaagcgattgccgaattcaagaaaagaaaaaataaataaaaagataaaatgaagtacattacaaaagaagtcagaataggtattgcaggtatcgttgcactatgtgtgcttatatatggaatcaactggctgaaaggtatacacatgtttcagccttccagctatttctatgccaaatttgaaaacgtaaacggactcactaaatcaagcccggtatttgccgacggtgtccgtgtaggtattgtacgtgacatctattatgattatgccaaacccggaaatgtgattgttgaagtagaactggacaccgagttgcggattcctaaaggaagtaccgccgaactcgtatccgaacttatgggaggcgtacgtatgaatattctcctggcaaacaacccacgtgaaaaatatgccgtaggagatactatccccggcacaatgaacaacggcatgatggaaagcgcagcaaaactgataccgaaagtggaagagatgctgcctaagttggactctatcctcatctccctaaacaatatcttaggtgacaagagcattcctgccactctgcactcaatagaaaaaacaaccgccaacctggcagtagtcagttcacaagtgaaaggactaatgagcaacgatattcctcaactcacaagtaaactgaataccatcggagacaactttgtggtcatcagcggaaatttgaaagaaatagattatgcagccactttcaaaaaaatagacgaaacactggctaacgtaaaaatacttacagagaaattaaacagcaaagacaacacgctcggcctgctcttcaacgacccgactttatacaataatctgaacgctacaacagaaaatgcagccagcttattagaggacctgaaagagcatccgaaacggtacgttcacttctcattattcggcaagaaagataagtagcaaattcttgttatatagatttcatctaaataacaaggagctttcaaaagaaagtagattgctcttcaaatgtctatctataaaccgaaataatattcccgtacaaacgtacaaagatgagaaaaaacgctaaatttaagcatataagatattaatatacagatacttacaaaatcgcaagagagggttagctgacagtgtccgacaacaaatacataagtcattgaaagtaaacacattattgttcgcatgaaaaaaacaagaaaaaatagatttgttttttccgaataagattcccaattttgcaaacgtagaagttttgcttaattaataaatgtattaaaagttactatgattgaatcaaatcatgtcgtactttggaaccgctgtctcgacgtaattaaagacaatgttcctgagacgacatataatacttggtttgcccctattgttccgttgaaatatgaggacaaaactttaatcttacagatcccgagccagtttttctatgaaattctggaagagagatttgtagatctaatacgcaagacattatataaggtcattggcgaaggcaccaagttgatgtacaatgtcatggtggacaagacttcgattccgaatcaaaccgtgaatctcgaagcaagcaatcgttctaccgctgttacccctaaaagtataatcggaggaaacaaagctcccagcttcttacaggctcctgccgttcaagatttggacccgcatttgaatcccaattataattttgagaacttcattgaaggatacagcaataaactttcaagaagtgtagcagaagctgtagcgcaaaaaccgggagggaccgctttcaacccgttatttctttatggagcatccggagtgggaaagacacacctggcaaacgcaataggcacgaaaatcaaagagatttatccagagaaaagagtattgtacgtttcggcacatttgttccaggtacaatatacggattctgtacgcaataacacgaccaatgactttattaatttttatcagacgatcgatgtattaatcattgatgatattcaggagtttgccggagtcaccaagactcaaaacaacttcttccatatcttcaatcatttacaccagaacggcaaacagctcatattaacttcagaccgtgctcctgtattgttgcaaggtattgaagaacgcctcttgacccgtttcaaatggggaatggtagccgagcttgaaaagccgacggtagaacttcgcaaaaacattctacgcaacaagatacaccgcgacggattacaattcccgccggaagtgatcgattatattgccgaaaatgtgaatgaaagtgtacgcgatctggaaggtatcgtcattgctatcatggctcgttccactattttcaacaaagaaatagatttggatttggcacaacacattgtacatggcgtggttcataacgaaacgaaagcggttaccatcgatgatatcctcaaagtggtatgcaaacattttgatctggaaccgtctgccatacatacaaaatccagaaaaagggaagtcgttcaagcacgacagattgccatgtatctagctaaaaaccacacagacttttcaacttctaagataggtaagtttatcggtaacaaagaccatgcaacggtacttcacgcctgcaaaaccgtaaaaggacaattggaggtagacaaaagctttagtgcagaagtacaggaaatagaatcgttactgaaaaagagaaactgaaattaagtataaagtataaagtattaagtattaccctggtgcgaaaccgtataataaagcctgtccgcatggataatactttatacttaatacttgaaaaatacttaatacttatttcaagaatccttgctgacgaagtactttcaatagattttcggacataaattcgttatctttctttgtgtaacgcacgtccgtaaagacttgagccaatgtttcttttttattttcttcgataaactgcttgttttccggcaatgattctttgtaggcatagagtttatctatttcttccggtgtatagtcgtgatatttttcatcgtgcacggcagcttccaaaggcaaacggtctacttgtgcgggaataccatccggatagcctaccgttattgtggtgagagggaataccagttcggggagttggagggtatcaataatcatttgaggattataagtggtagttcccaaataacaaatgccgagtcctgcttcttccgccagcgtacaaaaagtctgtgcaacaagcaaagtatccatagacgcattcataaaagacattaaattatcgtagcccggcactgctttccgctgttcacaccatttgctgaaacgacggaaatcagcacaaaaagtcagtacgactggagcattttttaccatcggctgattgaaatgagcaggcgaaagtttctccttcatttccgcatcgcgagtcacaatcacactataaagttgcatcccacccatcgtagaagcacggaaagaggtttcaagcaaatcatttaacaaactcggatttatatctttaggcagatatttccggatagttcttctgttctttacggtttcaaacatatcttttttttgcaaagatataaaaagaaaaaaataatccaccacactagtggaatagaatagttttctttttggagaactttaacctttgaacaaaatccaattctaactctttatcaaatacttagcataaacaaatggaaaacttgcaacctgttaataaattaattcatttttattttgatagatgaaaaaacattcttagctttgcgcctacatttgttaacgataagtaaacttctacatattacttattaaaaacgagatttaacacaaattgaatcgtggaaaaacagatttattcttacgacgaagcctatgaagaatctttacgatattttcaaggcgacgagcttgctgcaagggtttgggtaaacaaatacgcagtaaaggattctttcggtaatatctatgaaaaatccccggaagacatgcattggagaattgcaaatgaagtggcacgcgtagaatcgaagtatccgaatgcgttaacagcaaaagaactgtatgatttactggatcacttcaagtacatcgtcccccaaggtagcccgatgacaggaatcggtaacgactaccaggttgcttcactatccaactgcttcgttatcggagtggacggtgcagccgactcttatggcgctatcatcaaaatcgacgaagaacaggtgcaactaatgaaaagacgcggtggtgtaggtcatgacttatcacacatccgtccgaaaggttctcccgttaaaaactcggcgttgacttctaccggtcttgttccgttcatggaacgatattcgaattccactcgtgaagtagctcaagacggacgtcgcggtgcattgatgttgagcgtgtctatcaagcatccggattcggaagcattcattgatgccaagatgaccgaaggtaaagtgaccggagcaaacgtttctgtcaagttggacgacgctttcatgcaggctgccgtagacgaaaagccgtatgtacagcaatatcctatcgactctgcccaacctacattcaccaaggaaatcgacgcttctaccttgtggaagaaaatcgttcacaatgcatggaaatcggcagaaccgggcgttttgttctgggatacgattatccgtgaatctgtgcctgattgttatgcagacctggggtatagaacggtatctaccaacccatgcggagaaattcctctatgtccttacgattcttgccgcttattggctatcaatctatattcttatgtggtaaatccgttcaaaccggatgcttattttgatttcgacctgttccaaaaacacgtggctctcgctcaacggatcatggacgatattatcgacctcgaactagagaagatcgaacgtatcatgaccaagattgacgaagatccggaaaacgaagaagtgaaacatgcggaacgtgcactttgggagaaaatctacaagaagagcggacaaggtcgtcgtactggcgtaggtatcactgcagaaggtgatatgcttgctgcattaggattgcgctacggaacggaagaagcaacggaattctctgaaaaagtacacaagacagtagctctcggcgcctatcgttcttcagtggaaatggccaaagaacgcggtgccttcgaaatatataatagcgaacgtgaacagaacaatccgttcatccaacgcctggcagcagctgatccgaaactgtatgaggacatgaagaaatatggtcgccgcaacattgcctgcctgacgattgctccaaccggaacgaccagtttgatgacgcagaccacttcgggtatcgagcctgtattcctgcctgtttacaaacgtagaagaaaggtgaacccgaacgatacgaatgtgcatgtagactttgtagacgaaacaggggacgcatttgaagaatacatcgtattccatcataaatttgttacttggatggaagctaacggatacgacccggccagacgttacacccaggaagagattgacgaactggttgccaaatctccttattacaaagcgacttctaacgatgtcgactggttgatgaaggtgaagatgcagggaagaatccagaaatgggtagaccactctatcagcgtaaccatcaatctgccgaacgatgtggacgaggatttagtaaaccgcctgtatgtagaggcatggaaatccggctgtaaaggttgtaccgtatatcgtgacggttcacgctctggagtgctgatctctacgaaatcggataaagacaagaaagaaggacttcctccttgcaaaccgcctacggttgtagaggtacgtccgagaatattggaagcagacgttgtccgtttccagaacaacaaggaaaaatgggtagcttttgtcggattattggacggacacccttatgaaatattcactggtttgcaagatgacgacgaaggtatcttgctgcctaagagcgtaacttgcggacgtatcatcaaaaatgtggatgaagacggtaccaaacgttacgacttccaattcgagaacaaacgcggatataagacgaccattgaaggattgtcagagaagttcaacaaggaatactggaactatgcaaaattgatttccggcgtgcttcgctaccggatgccgattgaacaggttatcaaactggttggctctctgcaattgaacagtgaaagtatcaacacttggaaaaacggtgtagaacgtgcattgaagaagtatattcaggatggaacggaagccaaaggtaagaagtgcccgaactgtggcaacgagacattggtttatcaggaaggctgtctgatttgtactacttgcggcgcttccagatgtggataatagtcctacgtatgttaattaatatataaacaaaagattaaaaggagtccggtgcggctccttttattttttattcaaaaaaatgtcttatacttgcagtgtcttacatatacaatcaaaatctaatatatatgattctatcatttaatattgaataccgcaccaattggggagaagaagtaaggatttccggcttatttccggaatcaattcctttacacaccaccgatggtatctattggacggcagaacttgagcttgaagtccctcaagaagggatgaccatcaattatagctatcagatagagcaaaacggaatagttatccgcaaggaatgggacagtttttcgagatctattttcttatcaggcagctccagaaagatatacagaatcaatgattgctggaaaaatattccggaacaactgtatctttatagttctgcttttacagaagccttactggcacatcctgaaaaagagaatatcccgcaaagatataagaagggactggttatcaaggcctacgccccacgtatcaacaaagattattgtctggcaatttgtggcaaccagaaatcattaggtcactgggacccggagaaagcggtgttgatgagtgataccaatttcccggaatggcagatagaactggacgccagcaaactaaaatatccgctggaatataaattcatcctctacaacaaacaggaaaagaaagcagactgctgggagaaaaaccctaaccgctatctggcagacccggaactgaaaaccaacgaaacgctcgtgatttccgaccgatatgtttatttcgacattcccgcatggaaaggggcaggaatcgctatacccgtattttctttaaaatcagagaaaagtttcggagtaggtgatttcggcgacttgaaacgtatggtagactgggcagtaaatactcgccagaaagttattcagattttaccggtcaacgacaccaccatgactcatgcatggacggactcttatccttataacagcatttctatttatgctttccatccgatgtatgcggatatcaggcaaatgggaactctgaaagataaagaagcggcatcgaaattcagcaagaaacaaaaggaactgaacagcctccctgctattgactacgaagcggtcaaccaaactaaatgggagtttttcaacttactgttccgacaggaaggagaaaaggtattggcttccaaaggtttcaaagatttctttgaaacgaacaaggaatggctgcaaccttatgcagtctttagttatctgcgcgacgcctacaaaacgcccaatttccgcaaatggccgagacactctgtttaccaagcggaagatatagaaaaaatgtgccaaccgagaacggcagattatcctcatatctcgttgtattattatatccagtatcatctgcatctacagttgttgtctgcaaccgaatatgcccgccaacacggtgtcgtattaaagggggatattccgattggcatcagccgcaacagcgtggaagcctggacagaaccccattacttcaatctcgacggacaagcgggtgctccgcccgatgatttctcgatcaacgggcaaaactggggattccccacatacaactgggatgtcatggaaaaagacggataccgctggtggatgaagcgttttcagaaaatggcggaatacttcgatgcttaccggatcgatcatatcctcgggttcttccgtatttgggaaataccaatgcacgctgtacacggattgttaggtcagtttgatccttctttaccgatgagccgggaagaaatcgaaagttatggtctaacgttccgggatgaatatctgctaccattcatccatgaatctttcctcggacagttgttcggaccgcatacccatttagtcaaacaggatttccttgaatcggttgataactccggactttatcggatgaaaccgggattcgaaacacaacgggaggtagagcaattcttcgccggtagaaatgatgaagatagtgtgtggattcgggaagggctttattcattaatcagcaacgtcttatttgttgcggataagaaagaggaaggtaaataccacccgcgcatcggtgtgcaacgggatttcgtattccggtcgctgaacgaagaagagaaaaatgcgtttaacagactatacgaccagtattattatcaccggcacaacgagttctggtatcaacaggctatgaagaagttacctcaactgacacaatcaacccgcatgttggtttgtggagaagatttggggatgattcctgcttgtgtgtcgtcggtgatgaatgatctccggattcttagtctggaaattcagcggatgcctaagaatccgatgcatgaattcgggcatttaaatgagtatccgtaccggtctgtctgcacaatctccactcacgatatgtctacgttgcgtggctggtgggaagaagattatcaacagacccaacgttactataatgcaacgttaggacattatggagttgcaccgacaactgccaccccggagttgtgcgaggaaatcgtacgcaaccatctcaacagtaattccattctctgtatcttgtctttccaggattggttatcgatagacgggaaatggagaaatccgaatgtggcggaagagcgaattaatgttccatccaatccacgaaactactggagataccggatgcatctcactctggaacagttgatgaaagcaaaaacacttaatgataagattagcgaattgattaaatacacaggaagagatctgaataaatagaataaaaggtacaagtaactttcaaaaaggatattttccggacactaccgacgcggataacactagattaagaacgctaaaaatctatgtgatccgcgtcattcgtttttcaaggatatattgataacagaggtaaaataaggagtttcaaaacatagtcaaccatttttttcgcaataatatcattactatatatcatactttttcgcttttcgcatcattcgtttattttttcaatgttcctctttttattccgatttataaagtatctttgcgccgaaaaagagaaattaaaagagataatggaaggcaaccagagcagacgtatcgattttgtggacttaaccaaaggagtctgcattatccttgtggtaatggcacacgttggaggggccttcgaacaactggatacgaattcgatgttatcctgtttccgcatgccgctttacttctttatctcgggagtgtttttcaaatcatacgaaggcctgctcggattcatcctacgaaaaataaacaaattgattattccttttcttttcttctatctaagtgcatttctaatgaaatacattgtttggaagattgctccgggggtatttcaactgcctgtgtcgtggaatgaactcttggttgtatttcatggacacgaccttatcaagttcaatccaccgatctggtttctactcgcattattcaattgcaacatcctgttttatctaattcactttctgcgcgaaaagcatctgcctgtcatgttcgctgtgacaatcctgattggttgcgcaggattttatctcggaaaattacagatagagttacccctgtatatagatgtttccatgactgccctccccttctatgtggccggtttctggatccgacggtataatttctttctatatcccagccatcgtttcgacaaactgataccggtttttattgtattggcactggtggtaatgtactttaccgctaccacattgggtatgcgtaccaacaattatgcgggaaatatttttcaagtatatatcgctgcgtttgcaggaatatttatgattatgttactttgcaaaaaagtgaaaaagataaaggttgtttcttacttgggacgatattcaatcatcaccttgagtattcatggcccgatacttcattttttaggtccattagtcagccgttatattcacaatagttgggcacaagcaagcgcacttctgcttataacattaagcatctgccttctgctcacacccgtctttcttaaagtgattccacaaatggttgcacagaaagacctgttaaaagtcaaacaagatcacactaaaaagacagtatatgaagataaacagtagctatatccttttgaaggaaattcgttgttacgcctatcatggagtcgcaccgcaagaaaatctgattggaaatgaatatctcattgacctgaaactgaaagtggatatcagcaaagctgcccggacagatgaggttgccgacactgtcaactatgctgaagtacatcaagtgataaaaaatgaaatggctattccgtcaaagttactggagcatgtcagcggacggattatacaaaaactctttgaccaattcccttgcattgagaaaatagagctccggctttccaaacggaatccgccaatgggagcagatatagaatcagcaggcattgaactgcaatgcagcagagatgaatgatatattgctctataaatgatatgacgtaaactagcagaatacagattaaaatcacttgcaagaactccccttgccattatttcggaacaattgggaattgttgttagcatacacaatatgcaaacgcaaacttcctaattgaagtagaaaagatagtgacggtatatgcttgtgatagtgacgctatcgttgtcatataccgtcactatccttactggatagcgtcactattttataaagggaactcaccaacaacttttctcaattgatccattatttccagttgagtataaacaggggataattgccttataaacacgcagataatacaattttaatctgtattatctgcattatcttattaaataataggcaatccgcttctattatttacactccgaaccgacttattttctcttcttttttcttcgatttaccgattcgacagcctccgtcaccacaggtttatcctggaaacgtttcgtataactggaatagtccggatgaatacgttcgtaatcaggatccataaataacggactggaaataatatgatctgccgtagaacggttacaacagaaaactatattttctacaccggccaaacgggttaatgctttcacatccgtatcatgcggttgcagtgtcatgggatccgtgaagaaaaagagataatcaatctgcccatccacaatacgtgaccccatctgttggtcaccacctaacggacctgattttaaaatcgtaaaatcccactcttcatcaggatgtttctccttcaatgcttccaatatcaaagtacctgtagtacccgtacagtagaatttattacccatcaacagttccgagttccatagcacccattcgatgaggtcttttttcattgcatcgtgtgctaccagcccgatgcctcttctaacctttgattccatttgctatccttttaaaatccgacaattgagagaaccgtctgcatcctctcgcataaaactgccacaagatactactttttgtccgttcaggtatcggattcaaagttttttttctcatattctcttcacgggataaagaaaatgacgaacatagttgtttatactctttccgcgcacgtatcacagcacgagcattgtcccagtgcccttgcaacaagaaattaaacgctgccacataatcgagacaggcccggatacgcatcactttatttaactccttctgtggaagattcttatagagcatgacaagattattacggaaattaagaaaagtcttacgaggattctcttttttaagagtagctcctcctacatgatagacaatactttgaggtacacagacaatctcacgattccgcgaacgaagtcgccagcacaaatctatttcttccatgtgagcaaaaaaacgtccatccaatcctcctacattcacataatcagtgtgccggataaacaacgctgcccccgttgcccaaaaaacaggaatcaccgtatcatattggccttcatccttctccacaactcccattatacgccccctgcagaaaggataaccatatttatcaataaagccaccagccgctccggcatattcaaaatattctttttgtcgttgacttcgtatcttcggctgacaagcagccacctccggatgagcatccaaataagcaatcattggttccagccaatgctccgtcacctcgacatctgaattcaaaagaactacatattctgcgtcgacctgctgcaatgcccaattatatccatcggcaaagccataattttggtcgagcacaatcgttctgacagaaggaaattcctgttgaagcaaactcacagaagtgtccgtagagccattatcagctacacagacctcaaccccctccccctctgaatagcggacgacggacggaagaaaagtacgaagcatatcgcacccgttccaattcaagattacaactgaaaccttcatcattattctttcttcttattcaattccttctgttccagctgatcagcctcttctttggttaatttccagcgtttatgagaccataaccagtatgccggttccctgcgaatcgtttgctccaacctatgggcaaacatttccgtgatttctccttctcttgtttctttcggtgtttccgtcattaacttgaactccgcttcacaataccctctacgcttcttactaagctcacaataaaaaacaggaaagttcatcattttagcaatacgctccgcaccatccaggaaagccgtctcctgccccaaaaaagtagtccagtatttatcatacccactgggccattgatcggtaatcagcccaactaccatctttttcccatcacgtttcaacttaataatttcacgtgctgtagaatgtttcgggatattatatcccccgaaacgagaacgaatacgtttaaataattcgtccagatatttatctctcaatggtttataaacttgcacagggacatcttccggtttcatgattgatcccatacctattaaccactcataattggcgtaatgaggaatcattactataatacctccatacttttcagttagttccagatattgctccgtattcttataagtcattcttgcacaaagctcttcggcagacatatgcaacaatttcaaatcttcaagcatataatccgacaaatagcgataaaacttgcgttctatctgtaatctctccgcatcagttttttccggaaatgatctcaatagatttccccgaactactttccgacgatattttccaacacgatacatcagcagataatttaaatccgaaagcatatataaaatccggaacggaagagctgaaaacagccacattccactgtataccaaccaatagataagttttgatctcataacttatatcaaaattgtacctttaagtgctgtcatctcctcattaaactctcccagacgtacattaactacctgattatccagcgagtcatcactttccacctctacacgaatataattctccgtaaatccatgcatcggagcaccagttttcgatttttccatcaataccggcattgtctgcccgatatgacatgcataaaaagcctgtgtcttttggtccgatagtgtcaacagacgttgactacgttgatgcttctcttccggagaaaccacatattctatttttaaggcttgcgttccaggacgttcggaatagctaaacacatgcaactgcgtcacatccagtccatcaataaactgataagcctgttcaaagtattcgggcgtttctccacgggttcccacaatcacgtccactccgataaaagcatccggcatcacctcttttatcttccttactttcgaagcaaaaagagcagtgtcataacgacggcgcattagctgcaaaacctcatcacaaccggattgcaaagggatatgaaaatgaggcataaaactgcgggagtgagacacaaactcaataatcgcatcagtcaacagattgggttctatggaagagatacgataacgttcgattcctttaacctgatccaatgcttttactaaatcaaagaaactctctcctgttgttttgccaaagtctccgatattcactccggtcagaacaatttcttttcctccctcggcagccgcttgacgggcctgttcaaccatggaagcaatagtcccgttacgacttcgtccccgggcaaaaggaatcgtgcaataagaacaaaagtaatcgcatccatcctgcaccttcaaaaagaaacgggtacggtctccccgtgaacacgagggagagaatgaacggatatctttggtcgtcgtagtgatagcttctcctttttcatgcttttggaggtcgcccagatattgaagcaattctcctttctgttccgctcccaacactacgtccactccatctatctttgccacatcaccgggcttcaattgcgcataacatccggtcactaccacaaaagcaccagggtgttgttttaccagacgatgaatcgcttgccggcatttcttatccgccatctccgtcaccgaacaggtatttaccacacagatatcagctttctctcctttacgcgcagtccgaactcctgcctcacgcagaattttaccaatagttgaagtctctgaaaaatttaatttgcagcctaaagtataataaacggctgtcttattttgaaatacagtggtatctatcataagctgttataaacacattaactttgcaaagttacacattattattagtaaaacgcttttggatacgaaagtttattcctatttttgcacaattcactaaaaaacgtgcaatgattaaagagaatttcattaaactatacgaaaatagtttccgtgaaaattgggatctaccttgttacacagattatggagaagatacccaatatacttatggggaggtagctgaaaaaatcgcccgtttacatctgttattcaaacattgtagcctccgcagaggggataagatttcagttatcggcaaaaacaacgctcactggtgcatcgcctatatggcaaccatcacgtatggagcaatcattgttcccatccttcaagactttacccccaacgatattcatcatatcgtcaatcattccgaatctgtatttctgttcaccagcgacagcatttgggacaatctggaagaggaaaaactaacgggactgcgaggcgtattctcactgaccgatttccggtgtctttatcagcgtgacggagaaaccatacagaagtttctgaaaaataccgataaagaaatgcattctttgtatccgaaaggatttgcccgcgaagatgttcaatataccactttatccaatgataaagtgatgctattaaactatacttccggaaccaccggtttcagtaaaggagtgatgttgacagggaacaatctggcaggaaatgtcactttcggtatccgcaccgaacttcttaaaaagggagacaaagtactctctttcctcccactcgctcatgcatacggctgtgcgttcgactttctgactgcaaccgctgtcggcacccatgtcactctgcttggtaaaactccttctccgaagattataatgaaggcttttgaggaagtgaaacccaaccttattattactgtcccgctagtgatcgaaaagatatataagaatatcatccagccactcattaataaaaaaggaatgaagtgggcactcaatattccgctgctcgacacacagatctacaaccagatatgcaaaagactgattgatgcactgggaggtcggtttaaggaaatcattatcggcggcgccgctatggacaaggaagtagaagaattcttctacaaaattaaattcccttttactataggttacggtatgacggaatgtgggccactaatcagctatgccccttgggatgagtttgtactaggctcttccggaaagattctggatataatggaagcacgtatctataaagaaacccctgaagcagaaaccggagaaatccaggttcggggagagaatgtgatggtgggctattacaagaatcaggaagcaacgcaggaagtattcacgcaggacggctggctacgcaccggtgatctcggttccatggacagcaacggaaatattttcatccggggacgcctcaagaccatgatcttaagttcaagcggacagaacatcttccccgaagagttggaaacaaaactgaataacctgcctttcattcttgaaagtctcgttattgaacgcaacaaaaaattagtagcactcgtttatgccgattatgaagcgttggattctctcggattaaacaatccgaataacctgaaaacaatcatggatgaaaatcttaagaatctgaacagcaatgtagccgcttatgaaaaaatcagcagaatccaactttatcctacggaatttgaaaaaactcccaaaagaagcataaaaagatacctatataacagtattgctgtcgattagcatgttctaaaacatacgaaaaagggagaaaagtagctagttacaaaaaaaattataaaaaaagttggtatttcgagaacaacatattgaaaaagtacataactttgcagcgttttaataaagcaattgattgtattacgtttttaaaaagcaaagaaaatgaaaaaattagttttgatggccgtagctatcgtagcagtatcattcgcatcatgtggtaacaaagcagctgacgcagcaaaagcaactgcagattctatccgtatcgctgactcaatcgcagcagtagaagcagcagctcttgaagctgaacaagcagcagccgcagcagcagattctttgaatgctgatagcactgcaactgaaactgtagctgaataattcagaaacagcttagagagaattgaaagtctgccatgcaaaagcatgcacagactttttttatgcttcaattttagcaattcacacgctatttagcgtatgaactcttcacaaaaggagcgtccaacaaataatccaagctcacttccacactctcttctaccggcatactataaccctcgatttcagcaacgagatagttaacacctgcagtttttgcattcttaaagatagcgtcaaaacctaccattccgctttgtccgatctctctgtgatccttaacatggaatatcttgaagcggccgggatatttattaaaataatcaacaggactgttttgtccgcgaactacccaataaaggtccatctggaagaagacatattcaggattcgtatgttccagcatataatcatacattactttatcttctactttctgaaattcatgagcgtgattatgatatccaaatgacaaaccttgttgtttgcaacgtttgcctatctcattaaaataagtgcaatatgtattcaaatctttaagcgtttttggaacatccatccaaggagctacgatgtacttcattcctgcagctttatgatcggcaatacactgatcccaccattgaagagactctgacaagtcaccggaagccaattcttctttggacaattgtctggtacaatgtgaagacaaaacttttaatcctgccgattcgacatctttcttaaactgttggggagtccggtcataaaatttaccgttgttataattggcagcttcaacaccggtatatcccatgtttgccaatttcttcagaagagcagtataagtggggtcacacttaccatctttattgtctaccttattcaatatatctctgacagaatagagttgaatagctacttcttttttagctttcttcttagtttgtgctgtcattgcctgtggaatcatgaaaagagcagccaacgcacataaataaatttttgttttcatataatagatatcaggggattacaattattagatttatatagaaaaaacaggcacggattacacagacttcacggttactctatggcaatcgccattcaaaaaaacgtgaaatacgtgtaactcgtgccttcttattactatttgattagtccaaaaccttcacgcggatgttgcggaaccaaacatcatcaccgtgatcttgcaaaccgatgaaaccttcgtgattttcgccaccacagttattcagcaattcaaatgccaaaggccatttatcttcgctgaacttacttgcctgcaacatatcagtccattgttttgtccacaaatgatattcaagtacgttttcatcgttttgtccatgaaccactgtacctttataaaccataatcttagccttgttccattcgccaaacggtttagagttttgaggaactgccggaatcatgtcatacaaagaagccgactgacgattgttatctttacccaatttagcatccggatgattggcattatccaggatctgatattcaggtgcggaaatataaataggttcaagcacatcattaccatctttgtctttagaagtaacttcctgagctaaatacagaatacctgaattgctacctttagcaaccttccattccaattccaactcgaagtttttaaatttgtgagcaaagatcaagtcaccaccatcaccgtcttgagcttcaccgccgccagaaccgttgaatttgatacagccatcttcgattgtccatttagtaggaacacggtcttttccataaccacgccatccgttaaatgtttcaccatcaaagattgtgatataaccattttcgtcaacaggcagattcaaactatcagtttccggtgctttcaatgatttagagtaagacaatgcaactttgctcggttcttcctgagcatttgcttttttctgaccaccgcaagaagcaaaaactcctgcagcaagacaacaacaagctaatggataaaatacttttttcatgataataacgatttaattttttatctttaatttctaatttatctcggcatatcaggcagtctccagccgtcacgataagtatgtttcactaattcagcagcaaactgtttcgcattaatcggatcagtccatgtcttgtcaaatgtcggatgaccatcatgaatcttgaatccgtctttgataacggtgcggatcgtttcgttatcaccaatattcgtaaagcacatgttagctccatcccattcaagagtcttattcagcgcttgcaaacgaatagccaatacacccattgccaccatttcattcattggtccggcttctgagaaatcagacttagtcatgatacggttagatttattttctttacatgcacgtacccagtccatctcgtgaccaccgttcatagcattgggaacacgacgacaaacctttggcacatttggtttacgaccagaaagcaaccaaggattctgtccataacatccgcaaatcaaagtatctttcgttccgtggaaaatagtcaaaccaccaccactctgcatcagttgttttccttccgggaatcctttcggacgttcaggcatcataccgccatcgtaccaatgtacttccacttcaggcatagctactttcggcatattttcacgagcagggaaaatcattttcacatgctgtgcctgcggagcacaagcattcaacaataaagtagatgacccttccactttagtaggatattgcaatttcaatgctctaaacggctgatgcaaaatatggcaagccatatcgcctaatgcacctgttccataatcccaccatccacgccagttccaaggatgataaatagcattgtaaggattcattttagcaggacctgtaaacaaatcccaattcaatgtgctaggaattttatcaaccttttcaggaacattcaatccttgcggccaaataggacggtctgtcgcacattccaccttagttatatcaccgatttcaccattccaaatccattcgcataccaaatccgtaccttcatccgatgaaccctgattacccatctgagtaacaacacctgttgaggcagctaattttgtcaataaacgagattcataaacagagtgggtcaacggcttctgacagtacacgtgttttcccattgtcattgcatcagcagtgatgatagcatgagtatggtcggcagttgcaacaattacaccgtcaatagatttacccatttcatcatacattttacgataatcccagtattttttagccttggggaattcgtcgaacacaccttttgcatacttccaatccacatcacaaagagccacaatattttcagtgccctttacgtgattaatgttggcatgtcccataccgccaatacccacagctgcaagatttaatttgtcagtaggcgaaacatgcccgtgactcatacctaaaattgtactgggagcaatggttatacctgctaaagcagcggctcccgttttgagaaactttctcctcgaaatgtttgacatgattttatttgtttaagggttaataatctttggaaggttgccatgcaacaatccatatccatttttcatgttttttcttcgctcgcgtatttgctccaaagtgcgcaaattaccaatagcaggcaaatcgtgtttgcgggtatcttttaagaatgtccacgcatattcggatgcaatggccgaatcgcgcatggacggtaagcgagaactgcgctttccggtttctaccgaatcagcaaacaggtcacacaatacgtctatattcttgccaccgaaaggcttctctacacggatggtctgattgacaccgtgcaggtcgacaacagcagtattgaagtcatgcgtcatacgcacaactccttttgtacctataatatctacatacgaattatgtgtctggtctttagataattgcccataaacaaacccttgggtaatatcaaaaactacaccattttgaaaagttccgtgacattgtacccaccaaggatctttgtagttccacatattcaccccctgggcattccatgttctgtaatcacaacctgcataccaacgggtaatatctacataatgcattccacaatcatggaaagcaggtccctcatactcatgaccttcacccggtgccaagccgggagtcatatgacaaatacggataatagccagctctccaatctccccttgctggatatattctttcatcaaattatgataccaggaattccgcagatacaagtttactgtagaaatgaggtttgtgttttccgtcatttctacaaccttccactcattttccattgtatctgcaattggtttctctgaaataatgtgtttgccgtaacgaatagctttttctatttgtcccatcctcgagtcagctaaagtaaaaagcccgactacctgcacactttcatcctcgaaaatcttttgattatcttctactataagggatccaggagctaactccttggctaattgacgtgattccggatcggtatcacaaatataagcaatattccaccgatcactttttgtcatcgcttcccaatagaatcttcccatcctaccgaaaccgataattccaactttaattctcgtgtctactgaagattgcgtgttcataattaagcatagtgaatttaagtacaaataataggtaaagtatcgattttcaccctcagcagatgagtagaaaaccgataatgcaaaactagccaaataaataacggcttatttgacttacacaactttatgtagatagaaattcatccttttacactattaatcaagcaattaatactttcaaagcatccaaaaaatgtagatgatttggaacagtctccaacactaaaatagcacttatgtctcttgtgttgaactaattttcataatttcattctcaaattcatctctgtcgacagctgccttatttctcatcttcgtgcgataattataaaccgtacttgtagagcaacggaggaagttcgctatcttcccactatccgtaatacccaagcgtaataaagcataaatacgaagttctctgttcaataaagcatccggttttaaaataattttctcttcatctttcaacagggcgttaaaatcagaaacaaaagtgggatacaaccccaagaagaccttatcaaaacgagtgtataaagcgctaagctcttcgtcgataagcgcggatgattttagcttcttaatcagttcatcatagtatttattaatagctattttatacagcatattctgatatttctccattttatggatatagctaaagcatacgtcaaagaattcggctatataatactcctttatactattaatttcgcacaactgattatttgtatcattcagttggctgttcatgctattcagtttgttgttcaatcgcaaaagttcctcattactctgtgccaatgcctgttttattttcaacgtctttttcatctgaatatagatgaaaagcaccaacaggactaaaagaaaaaggataatacttgtagaaataagaaaagtagtcagatgcgaccgtgatctggcctgctccgcctgataagctgtattaataatagaattaaatttataaatttcgatggcacggaaatgaataccggaagatataacgtcatcgatagcagactgtgtaaatttaaaggcatcagctaaattctgttcatcataggctatcaatgcaagagattgcagggatgcattttcccgcgtagcattccgggtatcggctattgccgacaacatcaggtattttttttcctcatcatactttttctgatggtgacataacctagaatacgaatgagttatcatggcataattaggcgtccccacttcttcaatctccaacagttccttaaaaatctctttcgatttcaatgtatcacgccaaatataataagaagcctgggacattcgataatcccaagaagtgtggtcaatgagggcaaacagagaatcttgataagcagcctgctgcttaccatacagattattggcgacagaaatcgaatagtgtccccaaaaactggaataagtttgataatagtttattaataaatctctgggaagttctgaagtctttatacttttcaaaataatctccgcttcgcggaacctgccacacatcgaatataaaaggctaagatgtaaagacgactggttggtgaaataaggtctattcaactggcgggaaatctcaatattgcgatcaacataatggatggctgaatcaatatgaaactttttatattcattatataaccgtagattgattctatattctccttcaagagtcaaaccgggacttctcaacatacattttatccggtttatccgatcctctttctctttaacaaagacgtgtttttcatctatcactctacgcaaagaatcagtcaatagtttcaactcattatttgcataaagaacactgccaattcccaaagcaatcagcagaagcaaaaacctcttctttagaaaacaatagttgaatttcataatagtaatagcaaagataacaaaaaaaagcgatttattcgttcagaacaaatcgcttttcatatatgaagtaaatttgctcttattcagcaactacctcgaaaggaatttctaccgaaacctccttgtgaagcttaacgatagccttgtagctaccaacttctttcacagcgtcttttacaacgatgatctttctgtcaacttcatgacccagtttagacaatgcttcagcaatctggatgttaccaacagaaccgaagatagtaccggttgagctaactttagttgcgatagtcaaagaaacgccttccaacttagcagccatagcttcagcatctttcttgattttctcaagtttgtgagcgcgctgtttcagttcttcagccaacattttctttgcagaaggagaagcgatgatagcttttccagtcgggatcagataattacgaccgtatccggatttcacgtttacgatatcgttcttataacccaagtttactacgtcttcttttaatataatttccatacttttcctccttcttatttcatcatgtcagttacataaggcagcaatgccaagtgacgagctctcttcacagcctgcgcgatacgacgttggaacttcaaagaagtacctgtaatacgacgcggaaggatttttccttgttcattcaagaatttcttcaagaattcaggatctttgtagtcgatatacttaataccactctttttgaaacggcagtactttttcttcttaacgtctactgacggcggagttaaatatctgatttctgattgaacttgttgtgccatgattaatcctcctttttgtttgatttaacacttcttctttttgcagcgtattcagcagcatacttatccatcttgaaagtcaagaaacggattacgcgttcatcacgacggaaattaatttccagcttgtcaattacagtaggatctgcattgaactcaatcagttgataaaaacctgtagactttttctgaattgggtaagccaatttcttcagtccccagttttcttcattaataatctcagcaccttcagcttgaagaacgcctttgaatttttctaccgcttccttcatctgaacatcagataaaacgggagttaaaatgaaaacggtttcgtattgattcatacttcgtttaattaaataaataaattatttgattttaaatgcgggtgcaaagttagacattttattttgaactacaaatatttaatctttttttgtatccgaagataggatttatccgggaagagacttacctttgcaaagttgtttaaacaataatttcatgatagagcaattcaatttcgacattcgacttatatttgccatattaaatggcaaagtttctgcggcaatcaaccggaaactgtaccgtaacttccgtcagaacggattggaaatcagtcccgaacaatggacggtactcattttcctgtgggaaaaagacggcgtgacgcaacaagagttgtgtaatgcaacttttaaagacaagcccagcatgacccgtttgatagataatatggaacggcaacatcttgttgtgcgcatttccgataaaaaagaccgccgcaccaacctgatccatctgaccaaagacggaaaagaactggaggaaaaagcgcgtgtcattgccggacagactctgaaagaggctcttcacggtatcactctcgacgaattgagcattggacaggaggtactgaaaaaggtgttctacaatacaaaagattagatagaagaacttctctccaaatcataaaatccactaaatcgtgcatttataatggaatttttatccaaataatttcgcccgttaaagaattatgctttaatttgtgactggaatattataatctattaaaatacacacacatgaaaggtttattaaagaacttaggattgatattaatcttggtcggagtagtcatcctgctggcttgttcctttacaggaaatgtaaacaacaacgccatcctgggtacttcagtagtacttgtagtactgggactcatttcttatattgttattaataagaagatcgctgattaatttcgcaaaatcaataaaaaatcccggaaacgaatgttcccgggattttttatttggagttatctcaaacgcaatcattaagattcaacttccggagtaatcagcttatagccttttccgtgaatattgataatttcgattgaatcgtcttctttcaggtgcttacgtaatttcgtgatatacacgtccatactacgggcattgaaatagttatcgtcaatccagattgttttcagagcaaagtcacgttgcaaaatctcattggcatgtgcgcaaagcaatccaagcagttcagactctttggtagtcagcttagtctgtttgccatctgacgacagaatttgtttctgtgtgtcgaaagtaaacttaccaatcttatagatattgctttctttgttcttctttccacgaacacgtctcaagattgcttcaattctgaatgtcaattcttccatactaaacggtttggtgatataatcatccgcaccgattttaaagccttccaggatatcttctttcaacgttttagcagtcaggaagataataggaatttcagcatttgctgcacggacatcctgtgccagtgtgaagccgtcttttttaggcatcatcacgtcaaacacgcacaagtcatatttattcttcaagaaagccttataaccggcttctccatcaggatataactcagcagaataaccttttgcctgtagatattctcttaaaagcatgccaagattttcgtcatcctcgcacaataaaatacgcagtttctcgtccatatcaattattttttaataaaggtaatgcaataataaatttagttcccacgttcaggtcgctttctgcccggatggttcccttatgatccaatataatttttctcacataagccaatcccagtccaaagcccttcacatcgtgcagattacccgtatgtacacgatagaacttttcaaatatctttttcaggttctcttttttgataccgataccgttatcctgtatcgaaatcatcagtttacccgactcattccacgttctcactttcagttccagatcctcttccggtttcttatatttcaccgcgttatccatcagattaaagattacattcgtgatatgcatctcgtctgcaaatataacaggatcggtggcctcaaggttcgatgttatcttaccattataccgttccactttcagcgcaaaggtattgacaactcctgcaattaagtcattcgcatcaatctccttcatcttcaaagttgccttctgacgctcaaacatcgacatctggagcaccttttccacctggaagcgcaaacgcttggtttcatcattaatcactcccgatatatgctggaacatctgcggcgattttcccaccgcgggatctttcaacatctgggctgctaatgaaatggtagatatcggtgttttaaattcgtgcgtcatattattgataaagtcattcttcatctccgtcagtttcttttgccggaatacgatataaatcgtaaagatgaatgtcactaacaataccagtgtaaatatcagcgacggaatcatgaaactgatggagtcaaagatataatctttcttccccggaaagtgcactttcaagatactcatttttgcaggcgggtcattcttgaacaatgcctgctgataagcgtcttcacttccctttgcttcataatccgcacaacggtagacttccctgccgtctttgtcgatcaccgtaaagtgataaggcaaatctatactattattatataagctcgatttcagatagtcatccagttctttaaaccgtactctgtctccaatcgacttgtcacttcctcggtaaatcatctgccaggccacttcatcgagtaatgcccgttgatacatataccgattcttgatggcttccactaatgaacgcgaagtttccggaatagtctttgtccccctgtaaggagaaatcatagccttcggaagctcggagggcttagtggtcatcactttcagctcaaaatccgaatataccttgccatccttagacttcaccgtaaaccgctgcgtttgctgaatcaagttgtcttgttgtatggaagcattattcgcaatcagcgcttttctttctgcttctgaaatatcttcgatcaaccaacgtctggtctctgcatattccacatccttggaaacctgatccaggctattgcgcacagccgaatcaaactgttccttacgggttttcatcatttcctctatataacttacctgcaaatacagcagactaaggaaggaaagccccattacaatacctaatatccaaattgttgacttcttcatagcaacaaaattaacactccctaattaacactcctaatgcattaacttgatttaaccggaacttcccggaaattaaccgtaaggagctatttaggttgtattctgattactacaacaataaaacccctcctttggtttgcaaatttaataaaaaattaaatcttctccttgtgtttttccatctttattaatcatagttaaacaaaaaccgcccccttttacttaaaaaaggcggcggttttaacgttttagttgattctttatgcctaacagatgataaataccgaatattatagtgaatattcaatcaattatcacctatcatttatacttattcttcagtttgtttagcttcaaagtccttcattaacttatcttgaacatccgtcggcacaagctcataactagagaatttcataatgaacgaagcacgtccacccgtgagagagctaagcgccgtagaataagatgacatttctttcaaaggtactttcgcaaccagtttctcaaaacctttttcactactcatacccataatcatggcacgacgtccctgcagatctcccatcacatctcccatcctatcagacggaacgaacacttctacatcataaatcggttccagaattttcggaccggcattcttgaaggcttcactaaaggcattacgtccggcaagcataaaggagatttcattcgaatctaccgggtgcatcttaccatcgtaaacaataacgcgcacgtcacgagcatacgaacccgtcaacggtccttgctccatacgagacataatacctttcataatagcaggcaagaagcgggcatcgatagaaccaccgacgatactgttaacaaacaccagtttacccccccattccaatggtatctcttccgtacctctcacggtaatcttaaattcctgtccattgaacttatacgtttcaggcacaggcataccttctttataaggttctacgatcaggtgaacttcaccaaattgaccggcaccaccggactgtttcttatgacgatagtcggcacgggcagcctttgtaatcgtttcacgatatggaatcttcggttcttcatattttacctgaagtttttcgttgttttccaaacgccatttcaaggtacgaagatggaattctccctgaccgtgtaccaaagtctgtttcagttcttttgattgctcaatcacccaggtaggatcttcttcgcgcatacggttcaggatactcatcatcttttccacatccgcttcattcaccggcttaatggcacgggtatatttagagttcggatatttgataaaattgaatttgtagtcacaatccttaccgttcagcgtattaccggttttcacgtctttcagtttcacggcagcaccgatatcaccggcctgcaattcttccaccttgacacggttaccaccggctaccacatagatttgcgcgatacgttccttcgaaccacggtcggcattcagcaaatcgtctccctcatgaactttaccgctcattactttaaaataggaaacttcaccgatatgcggttccacacttgtcttgaagaaataaagagattccggtccattggagtccggagccacttctttaccttccgtattctgtaccttcggcatttcagatacaaaaggaacaacgttacccaagaattccatcaagcggcgaacacccatatctttacctccgcaaacacagaatacagggaacatacctctggcgatcaatcccttacggataccttcacgcatttcgtcttctgacagggaatcttgctcgaagaatttctccatcagattttcatcattctcggcagcagcttctaccaatgctttgtgcatctccatagccttatccatttcttctgccggaatatcttcgattgtcggagcccctccttcgggtttccatgagtatttcttcatcaacaatacgtcgatcagcgcattaaagcccggaccggtagctatcggatattggataggaacaaccttagagccgtatgcctctttcagctgttcgaggatattatcataatcgcatttttcattatcaagctggttgactagaaaaataacaggtttattcagcttttctgtataacggaagtgattttgtgtaccgacttcgacgccatattggccattgagaaggataattgctgtgtcggtcacatttagtgcagtcactgtgctgcctacgaagtcgtccgatcccggacagtcaataatattaagttttttgttattccattctacatggagaacggtggagaaaacggagtaaccatactcttgttcaacaggaaaataatcgctaactgtgttttttgcggcaacagatccgcgacgttttataacaccactctcgaaaagcatcgcttccacgagagtggttttcccagagccagaacttcccaacaaggcaatgttcttgatttcattagtctgatatactttcataatatataagattttagtaattactcagtatgtttctcacataccattaattttgtgatgcgcaaattagggattaattgggggaaaagcaacacttatggcagtgttactaaacaatgttatgtaacacatctttaacacgaacattttcgaatcgggttaaaaattattttcgcatggctataaactaatttcatagttgcaacgagtaatccggcacgatgttatttttagttgttttccttccatacaatagtttccccgttgcctaatcagttttcgtttgacttaagtcaagcgatagtttaactttagtcattctatcgtttgacttaagtcaaacgaaaacccggctacaagttcgaatcttatttataaaagaaaagatcttaaattcagcattgcaggaaattatcttctactaatcgatgggagaattatctatttagcgtattcccgccccactataaataatttccgtcaacagcttttttgatatatctaataatagtcttacttttacacccacaaacccaaacagcatagctatggcaggtatctatcttcatattcctttttgcaaaacgcgctgcatctactgcgacttttactcaaccactcgcagcgaactcaaaacccgttatgtacaggctctctgccgggagttggcgatgcgtaaagaatacctgaaaggagaagatatagaaactatttatttcggtggcggaaccccgtctcaactggaaaaagaggattttgaacagatttttgataccatccgcgagcactacggattgaatcattgtcaggaaatcactctggaagctaatccggatgatttatcgcaggaatatctggaaatgctttcctcacttcctttcaaccgcctcagcatgggaatacagacttttgatgacgctacgctcaaactattgagacgccgccacaatgcccgtacagccatcgaagcaattgacagatgccggaaagccggtttccagaacatcagtatcgacctaatttacggattgcccggagaaacaaaagaacgatgggaaaacgatctccgccaggctatcagtctgaatgtagagcatatctccgcctatcacttgatttatgaggaagatacacctatatataatatgttaaaacagcaccagatatccgaggtagacgaagactccagtttagaatttttcacattactgatagagcatttgcagaaagcaggatttgaacactatgaaatttccaatttctgccgccccggaaaatattcccgccacaacacttcctattggaaaggaatagcttatctgggatgcggaccatcggcacattcttttgacggaatgacacgggaatggaatgtgtcttcaatcgacacctatataaaaggtatagaagaagactgccgtgctttcgagacagagtatctggacccaacgacccgctacaacgaatttattatcactaccatacgtaccgtatggggaacacctatagagaaactgaaacagatgttcggcaatgaaatgtgggagtattgtcaaaaaatggctgcaccttatctgaaaaatggtaaactggaggaatacaacggggctttgcgcctgacgcgtgaagggatttttatttccgacagtataatgagtgatttactttgggtagactaaccaaacaaacaaaaagccgatgaccgaatcagaagtaagaaagttattgcggcaaatgaaagaactggattcgcaaactgctttccgggacttttacaacatgacttatgaccgtctctttcgtattgcctattattatgtgaaacaggaagaatggtcgcaggaaatcgttctcgatgtattcctgaaactatggaagcaacgcagcaatttgcttgatgtgagaaacattgaagattattgtttcattctcgtcaaaaatgcttcgctcaattatctggaaaaagaatcaagacatacgcttattcatcccgattctctgccggagcctcaagaacagagctattcaccggaagaatcgctcatcagtgaagagctgttcgctctttacgtaaaagcactcgaccggcttccggatcgttgcagggaagtgttcatccgcatccgtgaagaaaaacagagttacgcacaagtagcagaagaattaggcatcagcatgaatacagtggacgcacaacttcagaaagcaatcacacgtttaaaagagatgattagccgggctgaaatagattaacattcttttagacaaagagcgtagggagtttctgtcaccctccggtctttatcaacaaataagtcaatcaatcactaaaaaagacagaaaatgaaaaagctaaatgacgcaaacatggggatctttgtccttctttcagtttgtctgtgcctgttttcatgcaacaatgacaacgacaacctaccaaaggactatgcaggatttgaacattcgaaggaaacagtagaatgtgaaagcgacaaatccgaatgtgagttgaaaattaaaatcgttgcaacagaaaaaacaaaagaagaccggacggtagtacttgccacacctcctccggtaataggacaagcagcagtggtacagctaacagaaaagaaagtaatcatcaaagcgggtaagaagtcagcaacaactgtcataaaaatctatcctaaacagatgatattgaagaagcagaatgtcactttatcctgcactccccagtggaaagaaggagggatcagcaaactgaccattctgttgaaacgaaaataacagatcaaaagtaatacagaaagaactatgaaatttaccgatacggaattagaagaaatactgaacaagctcgtcgcttccacgcgttcaccgcgagggcggttttcagcaacagccagttacccggaactagagaaaagactgaagtcatatacccggcgtctgacactgatacgtactttctcggcagcggcggcagtagctctactttgcctatcggtatggacagcctatttatatatgcaaccggtcacgatacaaacggtttccaccttggcagagacacgcacggtctgtcttcctgatggcagcaccgtcactctcaaccattattcttcactttcttatcctgaaaagttcaaatcggacaagcgggaagtggagctaaatggggaggcttattttgaaataagcaaagacaagaaacatccgtttatcgtgcagactgaaacgattgacgttcaggtgttgggaactcacttcaacgtagatgcctatcagaacaatccagatgtaaagacaacgttattgacaggttcggtagcagtcagcaataaaagtaagtcagttcgtatgattttgaagccgaatgagattgctatatataataaggtggaagaaaaactcacccgcaaggttttagaaaacgtagaagatgaaatttcctggcggcagggagagtttatattcgacgacctacctttgcaggagattgcccgcgaactatccaattcattcggagcaacgattcacatagccgacacggctttgcaaaattaccggatcacagcacgcttccgcaatggagaagacctgacaactattttatctgtattacataatgccggttatttcgactactcacaaaacaataaacagattattatcactgctaaaccagactaagatgaatattatattccaagatcgcttccctgtcagaaccattgttctgataggggtagcattccttatcaccacacaaatatacgcgcaaaatgcggacgcccgactttcgctgacactacgaaacgccacattgaaagaattcgtcaaacggattgagaattcaaccggatattcctttatctacagtgaggaaattaccataaaacataaaatcaatttgcaagtaaaggataagcctttgcgtgagatacttgaccttgcgttcaaaaatgagcagatcagttatcagttcaccggccggcatatccttctgcaaaagaaaaaagaatcaaaaactgtaagccgcaagttcactatcagcggatatgtcactgatgggacgtcttccgagacgttgattggaaccaacatcattgagagtcatcaaaatcaaggaacaaccaccaatccttacggtttttacagcatcaccctgcccgaaggagaaaccgaactgcgtttctcctatctgggctatgccacagaagcgcatcattttacgctctcacaagatacattattaaatatccgcatgcagggtaacacgcaattgcaggaagtagtcatcgtttccgacaaaaccgagacaggaactatagccacccaaatgggatctatcgaaattccaatgacgcaaataaaaaatactccgagcatactgggagaggcagatgtaatgaaagccatccaactgatgcccggcgtacaggcaggagtagatggatctgccggactgtatatacgtggtggaagcccggatcaaaatctaatcttacttgacgggattcctgtatataacgtagaccatatgttcggattcttttcggtttttactccggaagccgtcaaaaaagtaacactattcaaaagttcttttccggcacgtttcggcggacggctttcttctgtcatcgacgtccgtaccaatgacggagatatgcagaaataccacggcacacttagtatcggactactaactagcaaaatcaacctggagggtccgattgtgaaagggaaaacgtctttcaatatttccgccagacgttcgtatctcgacctcatcgctaaaccattcatgccggatgacgaggaatacagttattatttttatgacatcaatgccaaaatcaatcataaattctccgaccggagccgcgtctatctatctgcctacaatggaaaggatcattttgctgccaattatgatggaaatacagatttcaaagacggaagcaaaatgaattggggaaacacgattctttctgccagatggaactatgtattcaacaaccgtttattctgcaatacgacagtctcctacagcaactatttattcgacatcaactcatataccaacaatcaatatctcggcagtagcggtacatcatttaccaaccggtattcagccgattaccgttcgggaatcaatgattggaattaccagatcgacttcgattataatccatctcccaaacaccacctcaaatttggaacaggatatatctatcatcgtttccgcccggaagttatgacctctaaaatctccaataagacaggagataaaatagacctggacacaacctaccacagcatagccaacaaccggatttacggacatgagttatccgcttacctggaagacaacatcaagatgaatgatcgtctgcgcctgaatctcggactgcatttctcattgtttcatgtgcaaaaacaaagttacttttccttgcaaccacgtgtttccgcacgctatcaattgggaaaagatgtaaccctgaaagcatcttatacccaaatgagccaatatgtacatttactatcgtcaatgcccattgccatgcctacggatttatgggttccggtcactaaaaagatcaagccaatgcgctcccaccaatattcattgggcggatactatacgggaatcaaaggatgggaattctcggtagaagggtattataaggatatgtataatgtgctggaatataaggaaggcgtcagtttcttcggttcttcctccggttgggaaaacaaagtggaaatgggcaaaggacgttcggccggcattgagtttatggcacagaaaacccttggaagaacaacaggatggttgtcctacactttatccaaaagtgatcgtcagtttgccaaaggcggtatcaacaacggtgaacggttcccatataaatatgaccgaagacacaatatcaacctgacaatcaaccataagttcagcgaccgtatcgacatcggtgcttcctgggtgttctatacaggtggaacaagtacaatccctgaagagaaaaccgctgtcatccgtcctagtgacggcacaaacaacggatttgggggaggatatggatatggagattattttgattcaagcataacttcacccaccatcggagaagcttcatatgtggagcatcgtaataattaccggttaccagccagtcaccggttgaatgtgggagtcaatttcaacaaaaagaccaaacatggtatgcgtacctggaatatcagtctgtataatgcatataatgcgatgaatcctacctttgtatatcgcagcaccagcaaaaacgatcccaacaaaccgattatcaagaagtatactatacttccattaattccatcattcacttacacttataaattctaaacccattatgagaactcgtatatgttatccatttatcctgttaatagcattgctgacaacagtttcttgcgaaaacgaactcccttttagtgtaaaggacaatccccccaaactagtgatgaacgcactaatcaacgcagacagtctgaccaacgttctctatctcaatttcacgggaagaggatacgccactcatgtagaaaatgccacggtggaagtacgcgttaacggacagttatcagaaagtttacgtccgctcccaccccaaacggaaggagatatgcaatgccgcttccatatttccagcaaatttactcccggagatgtagttcgtatcgacgccctcacagacgacggacaatatcacgcatggactgaagtgaccgtaccacagcgtccacatgaaatagctgatatcgatacggtcaccattccaatgacaaagtattattatacgcagaattttctccgatacaaaatcaatatcaaagatcgatccaacgaagataattactaccggcttatcatggataagcaaatgacagtgaaagactataatgaagaaacaggggaatttgtcagccggacaatacatcgctatcattttatatcccgcgaggatattgtgctgacagacggacagcccaccaacagcgatgacgaagacaacggcatgttcgacaccgtaaagaatatatatggtgtattcgacgactcacgattcaaaaatacatcttacacaatgacggtttacaaccagacagatattgacggatttcctgaatacggcaccaatgtaaagatggatattattgtacgtcttttaagcatcacggaaacagaatattactatctgaaagcacttaacctggtagattccgacgcttacgatgaaacaataaatgaaccaatcaagtaccccagcaatgtacatggaggaattgggatgattggaatcagtacggagacaagtaagatcattcatatagaaaaaccacaacgatgaaaacaaatcataaattatggatagcagactgcgataaaccgtagttttgaagattcaccgtctgtcaataccgcttgcgtggatgatatggtcgaatgtctgtcaatagccatgaaagaaatcgtggaagagattagccaagatttacatttaatactatctttgcagccaaaaagcaggcactaactatgtttatcattattggaattatgctgacaggcatgcttcttggctacttgttacgcagtaaaagactatcatggatacacaagataatcactctccttatatggattcttctctttcttctcggaatagatgtagggggtaatgaatctatcatcaaaggattacacactcttggactggaagctgttatcatcacggtagctgcggtcataggaagtactctatgcgcatgggggttgtggtacctattatatagtaaaggaaaggagacaaaagcatgaaaggtagtttgattatcgtctctttcttcattatcggtactctttgtggagtttatcatcttattccatacgacttcaccgacagcaagctcagttactatgccctctgcggactcatgttctgcgtaggcatcagtatcggcaacgatccgaatactttgaagagttttcgctccctgaatccgcggcttgtattccttcccatcatgacgatcattggcacattagcaggttgcgccgtagcaggagcctttatgagccaacgaggtcctttagactgtatggcagtcggagccggatttggctattattcactttccagcattttcattaccgaatacaaaggtcccgaattgggaactattgcgttactttccaatatcatgcgtgaaatcatcgctttgctgtgtgcgccattattagtgaagtatttcggaaagctagcccctatttctgttggtggagccactacaatggataccactcttcctattattacccgatattcgggaaaagaatttgtaatcatttccattttccatggttttgttgttgatttcagtgttcctttcctagtcacgttcctttgctcaatatcattttaataggaataaatcctaaaaagcagattatttccactatcgttttcgcacacgtattacaaatatgtttcataaagaaccgtttttgtatcaaaaagcatatcatctcttgacttacatcaagaaatgaggctaaatagaatcttttccttttctttatttttatgctataaaacatattcttatatttgcataggtaaaaagaaaaaactaagcgcttagactaattttcaataggtattagatttgtttttaggaatagtttttaggtataacaattaaaaaagtaggtattatgaaacgtttaggattaacattagtggcagcgctctgccttgctgctacaacatttgcagccggaaatcaacctacaactgcaaaatgggaaggtaacatcaatgttagtaaattaggtaaatatttgaacttgaattcagttcagagtgaagaagtagccaatatttgcgattatttctccacacagatgtcaagagccacaacagcgaagaaagataaagaagcaaaattgcgcaacgctgtttatggtaacttgaaactgatgagaaagactcttagtgctgaacagtacgccaagtatgccgcattgatgaacatcactttacagaataaaggtattgaactgaataagtaaaatgattaatatgtaaaagagagagagggtggaagccggttggcttccactttttttatactgttatttaatagtcaccatcgtagccccaaacccatattcttggaaagaagcatcctgataacggcaattattatatttccgtttcaattcatcaatgacagcctttcgaagtaccccatctcccttgccgtgaataaagacaatcttctgttcacgcttattcttataagtttccatcacttcgcgaaacttatccaattgataattcagtatttcagcattgcccatcccttgagtatcatccagcaaagaatcgatatgaagatctatttcaataattccgctctttccgccatgagtagtatggtttggtttcacaataggttgtgacttcggtttatctacagatttcttctgcaacaaagcctcttgaatctcctccgccgaaacatatacttgtttggcaggcatatcatctttcacaatgtcataaatcaaagccggttcttcaaagaaatcagaatcgctaaatgtatgaagtttatagaacttcacggtatcgatccgtatctccacactaacagccggtttgatagccgcaggcttaccgtccttgaaagcgatcaactgaacagccacccgctccatatcattcaatacatctttggtgaactcttccaacagcaattttgtattaggctccaccaaaccgtgcgaacggttcttccatgcttttccttctgcactcaaataagtgtaatacaaataataattgctatcatttaccaaataagtctcgaaaggagtagtcatcatagcctttgcatcttcaggcacataagccagaaatacattcagcgtatctccccccttcacttccggctggcgttgaatgacgggcatctccggttttatcggtttagcaggtccctcttgtttcggagcagaagaagtcggtttacgcttcaaattatagtcatctgtttcaatcacgacacactcgcgtatcggcattggaatatcaaacccatctgcatcttctaccaacacaaaatcctttccctggaatccagttacgattccaccgcctacctcactaagaaagcgtactttatctcctattttcattattgtatatccaattaaaattcaaactcaaaaaaacgagtaacaaagatagagatttctatgaaattaaatggagattcggttctaaaaacaaaccgtctgcctttattcctctttttattgtaactttgcacccgacgaaataccaaacatataatctaaaattcaccattaacgacgaaaaccgatgaaagaacttattaaagtcattgcttttgatgcagacgataccttgtggagcaatgaaccttttttccaggaaatagagaaacaatacacagacctattaaagccttatggcacttctgaagatatttcagccgctttatttcaaacagaaatgaataatctgaaatatctcggctatggagccaaagccttcaccatttctatggtagagacagctttgcatgtgagtggacaaaagatttcaggtacagacatccaacatattattgaattaggcaaatcattactaaaaatgcctattgaactattgccgggagtaaaagaaacgcttaaagtgttgaaagagaagggtaaatacaaattagtagttgccactaaaggagacttactcgatcaggagaataagctggaacgttccggattagcctcttatttcgatcacattgaagtgatgtccgataaaacagagaaagaatatcaacgaatgttgaatatcttacagattgctccttccgaatttgtcatgattggcaattctctgaaatcggacattcaacctgttctatcgctgggaggatatggtatacatattccttttgaagtgatgtggaaacacgaagtagtagacacattcacacatgaccatctgaaacaggtgaaaagatttgatgagttgctacttttgttttaaataagttctgttctttcttcagataagctttaaatctgaagaaagaaatcagtgaacaatgccatcttattggattacaaatccaacagtttcatcaattcagcagcccgacacgcttctatcgaattaccgacagagagtttctccaaaatattctgccggtgtcgattgactgtattcacactaatataaagggcagctgcaatttctttactagatagtcctttacgtatacagcgaagtatttctttttcgcgttcggataggatattgcgatgttcttccgaaaaaaagagcgtttcgacctctccacgttccatatgggtaatagtgggacatatcccctgctccgttcgttgatctgcagacaaggtataaagacaaaaaatcaaccatacacttccggaaggagtattttccattatctgcactaggttatcaatatactgatagactcctttctcattcatcatacgtattctgcatcttccccggtacttcaaccgttcttcggaagacatcgaaaaggtcttctgaaaaaactgatactccaataaccgcttttctaccaagtcttcaggatgaatacgccgataaatacaatcttcatccatagaatcaatcacactcaaagcagcttcttcgggagttaagcctagaaaatgcgcccaaggatgaacggcaatataacttttcctattcgaaagatctgaaataacagcacatccaccattaatctccgtcaatgaatgaataaagcgttgatgttgctctacaactccattgtccaatatttcatcggctatcagttgtgtcgcataaacttcatctatttccttttgtaatacatccatcttataaaatggttattattcagtattgttgcacacggaggtatgagctatctttgcaccacaaagataatcaaataagaaatgatcatgaaacatttaaaaatcaaaatcatgtcaatagcctttatggcagtagcaacttcttctatggcacaaagtttgaataagatgaactggctgaacgagcctcaacagtgggaaataaaagatggcaaaaccttagtgatggatgttcctgcaaaaacagacttttggaggatttctcattatgggttcacagtggacgacggacctttctattatgcgacttatggtggagaatttgaagccaaagtaaagataaccggcaactatgtcaccacctttgaccaaatgggattaatgctgcgcatcgaccatgaaaactggataaaagcaggtgtggaatacgtcgacggcaaacagaatgtaagtgccgtagttacgcatcggactagtgactggagtgtagtacaattgccggatgctccccgctctatatggataaaagcagtccgtcgcttggatgcagtagaaatatttttctcacgtgatgataaagaatatattatgatgcgcacgtgttggttgcaagataattgtcctgtcatggtaggattaatgggagcttgtccggacgggaaagggttcaccgctacattcgaagaatttaaagtgactccattagccgatcaacgaagactggaatgggcaaaaaggcaaatgaacaaataaaatcagtcctgatgctatttatttaaatagagagaaagctctattataatataaatgcggtagtatatcttactttaaatgttctatttttaatatgatgagtataaatagcatcacacggatttcctcttccagcagttctgttgtataaaataatgcaagaatatacagttcccgaggagttttttacataaaaacagtcaaaagatacactataataaacttattgacaatcgtttctttaaaaggagtaaccagttccttttaaaggaacgattcattgatcggtgagaaacactttattcctttaaaaggagcatataaaactttattttaagtgctatcccagagctaacctacacctgaaacagccaacactccacatatcaatttgagacaaaacaaaggcaagttctatacatctattctataaaagacgcagactaaaacaaattattccaaaacacaatcgatttatttcttttctaaattcgaaaacagcaaatccgtctcattttcaactcatgcctaaatatatcctgcatatatagaattatacaacgataaaatatacgttttttcatatattatcgccaaaaccgtatatacttatctttctcacgatccaacgcaccttcatcgacacaatcacccaaccggaaccatgaatgttctatcaatgagcctctctttttaacagacttatcccagtttcctatcacttgtccttcatgaagaacaatcggataaaacagaccattattggtaaatgctttcgagtaatgctctttaggcaaaacgtctgtccggtctttataaccaagcaaatattcatcataagaaggaagaagatgcaaactgccggtaacttttccacgagtccggcaatcttcatgaatataccatgtctgtccattccattcttctgccgttaattccgaatcaatcaaataaatagcttgacgtgcatctgtaataggcagccccgaccaccagacaaaatcttgcaaaacagcaggagcatgactacgaaaatagcttctagccaaacgagccaaagattcatctttggtcaattccggcatcggcggaacacgctcttccaaaagcgcatacgtacatttacttcctttatcttccccactacatacaatccccacctgctccgcacgagccataaagcgggtcatacgatgattatccgctacaatccccgaacggttaaaatgctcggcaatctcctgcctcgtcaagcttttcttcccacaaagaattttctccaacagattatgacttttcgtatagagttcttcagaaatttccaagtcatgccctttcgcataagactcattagcagatataatacgcccggcggaaagtttcaacatccaccggatatcttctgctgctacgagatgccatgtcggacgcattacatgagtccgcaggatttcaccatcacgcagtgctttttccacagtttgaatcgttgccgacttcaaacgcattcctactgcccatttcaccatggaataattctgtgcctgcatagctcccatccaggacacaagttccttgggttgagagaaaagaggacttaataactgttggttgagtaaacgtatatttggtattttcattttaatttattgccatttttatcaatataaaaccaatcatcactttgccaggtccaattctccccataatcatccaatgcctttttttccccagtataggtcacttcggccttgccgtccttgaaagggcaaacgaaagcaaactgtggtttgatgataacattccccagtgtatcggcaaaccccatcagcatctcatcatttatgatacgaaaaagcccttcctctacataatccggtccattatcaaaactaaaggcataaaaaagtttttctcctttgttattaatagttgtccatccgggtttatgaggttccattacaaaaccgatatgccgtattgtatcacttcctccataatgatatttaccaaagggaacaatcgtatcaccttgctcattcaaataacagacagaagatcctaattccggatattcagttgacatataagcaataaggattgaatgatccgactgtttttgaccgtccaaacaaccagtcataaaaatgcaaaacaataaggcatacaaagattttagtttcatgagcttattattagtatattgcaaatataaaatttctttccatacaaatcattgttaatgataaaaagaataaataagaagatacagatattgcctcaactccttagccaagagtcaaaaccagttggaagtctccgaataaatctctacttttgtactccataacaaagaatagatcaagaaatgatgctctataaactcatccctccttcagtagtaacagcaactatccagttgccggcttctaaaagtatcagtaatcgtgcattaatcatcaatgcgctgggcaaaggtatttatcctcctgaaaacctgtccgattgtgacgatacacaggtgatgataaaagctctcaccgaagggaaagagacgattgacattatggctgcgggcactgctatgcgtttccttaccgcctatttaagtgtgactccgggggaacggacaatcacaggaacagcccgtatgcagcaacgcccgatacagatattagtcaatgcgctccgggaattaggagctgaaatagagtatgtccaccatgaaggatatcctcccttatgtatcaaaggggcagagttgaaaggaaatgaaataaccttgaaaggaaatgtaagttcccaatatatatctgctctattgatgataggtccggcactcaaagacggtttgactttgcatttaagcggagagattatttcccgcccttatatcaatcttacattgcaactgatgcaggactttggagccaaagccgcatggacttctcccagtagcatttccgttgctccacaactctatcagagcattcctttcaaagtggaaaatgactggagcgcagcttcctattggtatcagattgccgccttatctcccaaagcagaaattgaattattggggttgtttcctaacagttatcagggagatagccggggagcagaagttttctcacgcttaggtataactaccgaatttacatcgcaaggtgtgaaactgaaaaaaacaggcaaagcgccggaaagactggaagaagactttgtcgacattccggatttggcacagacattcgttgttacctgtgccttgctgaatgtccctttccgtttcaccggattacaaagcctgaaaataaaagagactgaccgtattgccgccctgcgagccgagcttaaaaagctgggatatatgatcaaggaagaaaatgacagtatattaatgtggaatggcgaacgatgtgaaccggaagaaactccggtgattgaaacctacgaagaccatcggatggcaatggcatttgcaccggcaattatccgccatcccaatttacttattgccgatccgcaagtcgttaccaaatcatatcccggatattgggaagatttgaaacaggccggatttcaggttataaacgaaggctaattttcatacgctgtggaagatttcaacaaatatacttcccacatcaactactcccctattgtagattttgtattacaacaggggaagcagacctattataagaaaggagactacttttcccgccagggagaagtatgcaaaacaatggggttcgtcagttccggttctttccggtactgttgcaccaacagtgtaggcgaaaacagcattgtaggctatactttcgatcattcttttgttggcaactatccggcttttcagttacaggacaaatcaaatgtagatatacaagccttgtgtgactgctcggtatacgtaatcaattatcagcaaatggcagacttctacgataccaacgacgctcaccaaaagttaggacgccgcatcgcagaaacgttattgtgggaagtctacgaccggatgatttcaatgtacagcctgacaccggaagaacgctatcttgaaattatcaaccgttgtcccgacttactgaaactgataactttaaaagaactggcttcctatcttctgattcgtcccgaaacattaagtcgtatccgaagaaaagtcgtacaaaaataaattcttgatttcaatcaagagtttatttattccctacccttacttttgcgggcaaacaaagtatattgtatttcatgaaaaaaattataattataggtgcaacttccggcatcggtcgcggattggcagaagtctattctcaagaagattatcttatcggcattaccggtcgcagagaaaatctattagaagaggtatgcgcccgggacaaagacaaactattctatcaagtgtgcgacatcaccgatacacaagctaccatttcatccctcgaaactctcactcgaaaaatgggtggaatggatatattgattatctgtgccgggaccggagaactaaaccccgaactctcctaccaattggaagaacctaccttactaacgaacgtgataggattcaccaacatcgcagactggggtttccgatatttcgaacagcaaaaaagcgggcatctggttactatttcctctgttggaggtacgcgcggcagtggcatcgctcccgcctacaatgcgtcgaaagcctatcaaatcaactatatggaaggattacgacaaaaagcaactaaatctccttattctatttacactaccgatattcgtcccggatttgtagacaccgctatggcaaaaggagaaggattgttttgggttactcccgttgataaagctgtgaaacaaattaaaaaggctatttctaaaaagaaaaaagtagctttcatttcccaaagatggagatatgtaactatcctgtttcgtctgttgccatctgctatttattgccggatgtaatgatagatactccatagccaacacatatttgtctaagtaaatctaatgaaaaaacacctgccccaactgtttatacagatattggtatctaccaaattctagttatgtatataagtctgtacgggaatcatattaatgataatagctaactcacaaataaacagctctcttacaattggaggacacttttagggttcagtaatcaatgatgaaaaaataagttctttcagaactaggatggtttataaaattagaattaacggcacaaatatataatatattttaatacatagcatgtattttcaaaaataatatcaaattctcattcattttttctttttaagaatacccaaagccgtattttatcttcatattgaaatgaaactacttgtttatttcatcatccttgttatttcatctaacacaaacaggtacgaaatagatataaaatgggtataaaacaagtagaaaagatcgcttaaaagaagactctttttttgaatttaaggctttgaatccaacgttttacgcacggaataagttctgaaagaacttattaaaagtaattccggattctaggaaaaactctaaattcaatgctatgttaaaacaactaaagtcagttagtatgttgttgttcctactgacaatgtcagtagaagcagcttatccggaaactggtgaaagcactctaaaagtttccgttgtacaacagggtactacttgtaagggtgtagtaaaagatgcagcaggtgaaaccatcatcggtgcatccgtcgtagccaaaggtacgacgaacggtacaatcaccggaatcaacggtgacttctctttaaacaatgtaaaaaccggagatattattgtagtctcttttgttggttatcagactcaagaaatcaaattcacaggacaatcattgaatatcatccttaaagacaatacacaaacattggatgaagttgttgtggttgcttttggtacacaaaagaaagtgaatgtaacaggatctgtatctacggtaggagcaaaagaaatttcggcacgtcccgttaactctaccatagaagctttgcaaggtatggttccggggatgaatatctctactggtgatggtggtggctccttaggttcagacaaaaaattcaatattcgtggtgttggaacaattggagctggttcaaaggtagaaccattggtgctcattgacggtatggagggagacatgaacgctatcaatccacaggacattgagaatatttctgtactgaaagatgcagccgcttcctccatttatggctcgcgggcaccaggtggagtcatcctgattacaacaaagaaaggtaagtcgggaaaaacggtagttaactataataacaacttccgttttgtatctcccttgaatatgcctgaaatggcagattcatacaattttgctctggcagtcaatgaccagttaactaatggtggacagactcccatgtatagcgccaccaaacttcaacaaattctggattttcaagcaggaaaaagcacacaatatatgtggccgaccgatgcgggaagatggaattcattcgatgatccccaacggcaagacgtgatgcctaccggcaataccgactggttaaaaacgttatttggtaatagctttacccacgagcattcattgagcgtaaatggtggaacggataaaatacaatattatctttctgcgaattatctggaccaaggaggtctcttgaagtttggagatgataacaaacaacgctactcctttactgcaaaaatcaatgcggacttaaccaaatggttgaaaataagttatagtatgcgttttaaccggacggattatgaagctccttcatttgccggaggcgatatcaaaagtaatgtattctatttcgatgtatgtcgctactggcctgtcattccggtagtagacccaaacggattctatactgtcgaatccaagatttaccaattaacagaaggaggccgatataaatcacaaaaagacgtgatggcacaccagcttgctttcatcgtggaacccatcaaagactggaaaattaacgtagaattgaactaccgttccaactataatttcaaccataccgattatcaaaccgtttatggttatgatgtgagtaaaaatccctacattattgccaatcaaacttccagcgttacagaatatgcttataagagtaatttcttcaatccgaacatctttaccgaatacggcaaatcattagaaagcgggcacaactttaaagtgatgctgggttttcagagcgaactattcaaacaacgtgatattaccgcttcccaagacggtatcatgtcggaagtggctaccttaaacaccacgcagacaaatgcacaaaacagaggagggtactccgaatgggctacagccggcttcttcggacgtgttaattacgactacaaaggacgttatctggctgaagtaaatatgagatatgacggcacttcacgtttccttcgagataaccgctggaatctgttcccatcattctccttaggatggaacatggcccgtgaagcattttttgaagacctgaccgatttaatcagcacattcaaaatacgtggttcatggggtgaattgggcaaccaaaacacagataactggtatccattctatcgaactattgatattaacaaagaccaatggggcaattacgcactaggcagttggctggtaaatggtgtaaaaccaaatatttccaaagaatctgcgctggtatcttccttactgacatgggaaaagacgcaaacactggatttaggtttcgacttatctatgctcaacaatcgtttgaatgtaacattcgactatttccagcgtaaatctaaaaacatggtaggccccgcccccgaactacccaacctcttaggcattgccgttcccaaagtaaacaacctcgatatgacttccaaaggttgggaaatacaggtgaactggcgcgaccagatacgcgactttaagtatggagttaccttatctttgtcagacaatcaagtggttattgataaataccccaatccgtcaaacacaattttagataaagacaataataatacgtattatgcaggcgctcacgtaggtgatatatggggattccaaacaatcggcatcgcaaagaccgatcaagagatgaaagatcatttggccggtatgcccaatggcgcacaggatgtactcggttccggctggggagcaggtgacatcatgtatgcggatttgaacggtgacggccagatcagcagaggtaacaaaacactggctgatcatggtgatttgaagaaaataggcaacagtacaccacgctacaactttggtttgaatctggatgccgcctggaaagggttcgaccttaaattatttttccaaggaacgatgaaacgtgattatatgccggggagtggttctacaatgttctggggagcagtaggctactggcaaaccaactttttcaaacctcatctggactatttccgcggagaagatacgactaatccgctaggagctaacctgggtggttattatccgcgtcctctcgagaatgatagaaaccgtaatccacagacccgatatttgcaaaatgcggcttactgccgtctgaaaaacgttactttaggttatacattacctaaatctttgacagagaaattctgcgtaaacaatctgcgattctttgtttcagcagagaatttatttactattaccagtctggccgatacgtttgaccccgaaactgttggcatcggcaactgggacggatgtacctatccgctatccaagactgtatcattcggtttaagtgcaacattttaaatgataaacgattatgaaaaaacatattaaacttttgacaataggaacattgctattgggcggactgaccggttgcaatgattttctcgacagggaaccactggataaagtaattcctgaaaaatattttgcatccgaaagtgatctggctgcatacacaatcaatgcttacccatttgaaacagtgaccgatgcgtatggcatcaatttcttcggcaaagataatgatactgataaccaagccagtggtgactcaccggccttctggatacccgggcaaaagaaggtgccgtctggtgaaggcgaatgggactggagcaaaatacgaacctgcaactatttctttgataatactttaccgaaattcgaagcaggcactattaccggcaatcaggataatgtgaagcattatatcggagaaatgtacgtgatccgggcatacaattattataaattattggtttctttaggagatctacctattatcactactgcattgcccgacatagaagagactttggtggaatccagcaagcgccagccgcgtaataaggtggcacgcttcattctggacgatttgcaaaaagcaacagaattgttgcttgataaaagtcccggtggcaagaatcgcatcagcaaaaacgtagctcacttgctacgtgcacgcgttgccctcttcgaagcaacttgggaaaagtatcacaaaggaacagcttttgtacccggtggaaaaggatggccgggtaatcccgcagatgtaagcggttttaatagtgatgcagaagtggcttattttcttgatgaagcaatgaagtcatcaaaagtggtaggcgactatatcgtcggaaaactggcagacaataccgatacccccgaaggtatgaacgccagtctggtttccatcaatccttactacaccatgttctgcgatgaaaacatggaaggatatgatgaaatactgatgtggaaacagttcaaggaaggattggtaaccagcaacttgcaaatggagttggcacgcaatggcggtggttccggatggactcgtggcatggtcaattcgttcctgatgcgcaatgggcttcccatctatgcagccggttccggttataatcccgattgggagaaagaaggagtaaattccactttacagaatcgtgattcacgcattgttatctttaccaaaaagccgggtgatgccaacaccgaaaataaaggtgatgtgaattattacggtgatgacggaactcccagttattgctcaatccgtttcatttatggcgataaaggaagtttggcaacaaccggattcatcatcaaaaaaggcaaacactactccagtcacatggcaaatgaccatagtgcgggaacatcaggtggtattgttttccgtgcggcagaagccatgttgatttacatggaagcttcgtatgaaaaaaatggtagaatcgacggaacagccgacggatattggaaagctttacgccgacgcgccaaagtggacgaagactataataagacaatcgctgcaacacagatgagcgaagaggctaaaggcgatttcggtgcttattctcatggccaattgatagacgcgacgttatataatatccgccgtgaacgccgtaacgaactttgtgcagaagctttgcgctgggaagacttgaaacgctggcgtgcatgcgaccagttgatatccaaaccttaccgtgtagaaggtatgctatactggggaagcaactatgaaacgcaactggcagatttatgtaaagtagatccggcagaaggtaatatgtcctcacctgatttaagtaaatatattcttccatacgaaaaaatcacgaagaataatctgattgccgggcagaagggattcctctttacacctgctcattatctgaatccgataggtatggctgtatttcgtcagacagcctcggataagaatgattttacaagttcagtcgtttatcagaacccgggatggaagattgaaggcgacaccggcgcacaacctgtagaataataaaaagataaaagaacaactctttgagtttacaaatatatcgaccttaatattatatatctgttatctttttatttttataaacttcattgtctcgctccagattaggtagaactgcggtcaatctaatcctaagttaggcaatgaagttttacattcgcatgagttctcgttcaacatcctctgcagatgtataaaaagtctttatgatttccatagtcacccaacagagattatccgcaaaattcactacatttgtatttgcttatctgtcaaccgggctaatcaagtattacaattactacactatccgattgataatatctaacttgaaacaaaggtgtatatgaatactgactttacaaacttaacaacagaaaatctttctaatgagcatttatgctgcatcatccacagcaaaaagtctcatcctggtattgaagcaaaacggcaatggctttccgaccggctgaatgaaggccatgtctttagaaagttaaacgccaaagctactgtttttattgaatatgcccctcttgaaacagcttgggttcccgtcatcggcgacaactattattatctgtattgtttatgggtgctaggtagcccccgaggaaacggatatgggaaagcattaatagagtactgtatagccgatgccaaagaaaaaggtagatccggcatttgtatgcttggggcaaaaaaacagaagagctggctttccgaccaatcatttgcaaagaaatttggttttgaggtggttgacactactgataacggatatgaattgcttgctctttctttcgacggaacagtaccgcaatttgcgccaaatgccaaaaatctgaaaatagaaagtgaggaactgacgatttattatgatatgcaatgcccctacatctataaatacattgaaatgatcaaacaatattgtgaagcaaatgatgtccctgtttcttttattcaagtagatacgctacagaaagcaaaagagttaccgtgtgtttttaataattttgctgtattttataaaggaagttttgagactgtgaatttgccacctatcgactatttaaaaagaatactcaaaaaataagaaatacaatcctgacttttcccgctaattatcaggattgtattttatctgcttcattaaaaagacttctcatttgccatcttccacatattgagaaaagaggctttggtgatttctacgaccttatcccaattcaatcggtcggcatgatcggaaggctggtgataatcaggatgcccgtccgtatgataccagatgatcggaatacctactttggcaaacgaaccgttatcacttcctcctatcggattttcccaggcgcggtaatccggttccaattgcaaaccgtattttctgatatcctctttcaaccaatccccaaagaccggatgggcggctgtgtagaaataaacgacttgtttgggttgttgaggtttgttgttacggccaatcatgtcaaagttcagatagcctttgatttgagataggaaaggacaagtttgtacaaaatatttagagcctagcagtcctttttcttctccatcccaaaaagcaaagattacatttctttcgggttgctgtccactggctaaaaaggctcttgcaatttgcagcactgccgatacaccggaagcattatcgtcagcaccattgtatatttggtcgccatcaagtacaggatcaatacctaaatggtcgaaatgagcccccacaatcacatattctttggtatttttaccgggaatcattcccaatacattcctcatggtaagcttctgatgaacttcctgtttcagttttgctatggaatcaggatgtacttcttgacgtccttttttctgacgttctttacggtaagcatcaaaaggctggaaatagctgtcagccaaaggcgatactcccatccattgcaacaaagaaacaatatattctgaagtcacacgcgaaccatgaaacccagcctcacgcccttgcaattcatcactagccaaaaagttgatagtagcttcggcagaggaacggttaattgtattcaaggccctctcaataggagattgggcaaaagtaatgtttccaaccaacagtaacgctaatagtaaataatctctcttcattgtacttcaaatatcttaagtcattttcattgattggtgaaatttaattcacccgccaatgtttattttgtaggtaacatacaaaagtacgaaagaaatagatagcatacatgatagaatgcaaatttataagtaactttgcacaaaattgattggtaactgttatattgtcatgtggatacttattataagtctggtgttgctgggtgtcattgcgctgatagccggaattatccgcaacaaaagactgcaaaagaaaatagaaaagggcgaactggaccgtatgccggaagtgaaggaagtagatgtggaatgctgcggacaacacgaagtatgcgaacgggatagcctgctggcagctgtcagcaaaaaaatagaatattacgatgacgaagaactggatcagttcattggcagggcaggagatgcgtatacagaagaagaaacagaaatgtttcgggatgtattgtatacgacactggatgtagaagtggccggatggatacgtagccttcagctccgtggcattgaattaccggatgatctcaaagacgaagtttttctgattatcggagaaagaagaaacgtagaagtaaaaaaagcagatgagaggtgatggatttactacaatatacattctttcaacacgccctattgggaagtctgctggcaagcattgcctgtgggattatcggtacatatatcgtaacccgccgcctggtatttatcagcggaggaatcactcatgcttctttcggagggatcgggttaggattgtttgccggaatttccccgatactctcggcagccgtattctcggtattatcggcttttggtgtcgagtggcttagcagacggaaagatatgcgcgaagattctgccattgcagtattctggacgttagggatggcactcggaattatgttcagcttcctgtcgccgggatttgcgcctgacttatcggcttacctctttggcaatatcctgaccatcaaccaaatcgatttatggatgctcggcatattggcactaatactgaccggattcttttatctgtttatccgccctatcgtatatattgcttttgaccgtgaatttgcacgttcgcaaaagattccggtagagatattcgaatatgtgttgatgatgttcattgcgctgacaattgtagcctgcctgcgtatggtaggcatcgtactggccatttctcttctcaccattccacagatgacagccaacttgttcacttatagtttcaagaagattatctggttatcaatcggcatcggtttcttgggctgcctgggtggattatttatttcttatcactggaaagtcccttcgggagcttccatcatattcttctctatcctgatttacgctgtttgtaaaatcggaaagagttgttgcaggaaaaagtcataataatagatagtatatggaaatcaaaattcaatcactggaaagtatctatgaagcagcccgtgaatttatcgctgctatgggcgacaacactgtatttgctttatacggaaagatgggtgccggcaaaacgacatttgtcaaagcgctctgcgaagaattgggcgtaacggatgttatcacttctcctacttttgccattgtcaacgaataccgttcggacgaaaccggagagttaatctatcacttcgatttttaccgcatcaagaaactaagcgaagtgtatgacatgggctacgaagactatttctacagtggcgctctctgctttatcgaatggccggaactggtagaagaattacttccgggaaatgccgtaaaagtaacgattgaagaactggaagacggaaatagagtaatcagactatgaccggacaatatatcgtacaaggaatctttgcgctagcaggaatcgtctccctgctggcgtcattgctgaactgggactggttctttacaacgcgcaacgcacaaaccattgtccggaatgtaggacgcaaccgggcaagactcttctatgggatactgggaattatcatcattggaatggctatattcttctttgtggaaacacggaaagccatcactctttgacacattttttttagacaaaagaacataagtacaaaagactacaaaaatatgttcttttgttcttatgtctaaagcaactgtcgtgacttcatctccagatacttattaatcacatcaattgaaagattctccggtgtagttaataaagaatagatgccatgttgtttcaaagtagatacaatcagccgcttctcgtaagcgaacttttctgcaatcacgtgccgataatacccttccgtatcttttgccggttgggcgatatattccttcaaatcgacatcttcaaaaaagactacgagcaaacggtgctggcggtttagttgtttcaggtaagataattgacggttcattcctcctatgctcgagaagttagtatatagtaccagcaggctacgtttactgacatgtttgttcaaatgaacgcaaagagccgagaagtctgtctccccaaaagtggtctgctggctataaagactttccagcaatgtctgcatatatcccgattgcttggaagcaggcacaaaagtatcgaagtgttcatcgaaagtcactaatccggctttatcttctttccgcatggcaacatacgaaagcaccagcgaagcattaattgcataatccagcaaggtcattccacagaaagcttgctgcatcactctacctttatcgatcacattataaatctgctgtgagcgttcgtcctgatacacattcaccataagttcatgccgacgggcacttgctttccagttaatcgtacggtaatcatccccctttacatactctttaatctgctcaaactccgtatgatgcccaacccggcgaatacgttttattcccagttctgtcagattatcacttattgccaacaattcatattgatggagcatcagatatgacgggtacactttgatatccaaaggttctgcacaagtatagcgccgggatataaagccgatttttccggtcacaaaaactctaatatgaccgaaagagtaaacaccacgatgagtaggtcgaagacgataggtaactgtttttccctcgtttgctccaagcttcacctgaaagtcgacatcacgtttctgaaagataaaagggatctcatctatgatttctaaagatacaggatgcggataactactttctacccgaatacttacttcattttcgtcgccattagagaaacggtcggcacactggcggaaagcatggattccacgaatacgataaagagaatatacgtctgccagtaccaccaaaagcaagacaaagagtgcccactgcccgataacaaagaacggagcaaaaacatatccgctacccaacaacaggataaccaggacaagggcaatatagaaacgacgagttagaaacaaatgatttatgaattatgaattatgatttatgatttataatttcttcaacttacaatttacaatttacgtacagtttataatttacgatttatgatttcttcgatttatgttatgaatagggtcagacatccaacgcgcagcccaaatcataaatcagaattcataaatcataaatcttttcattttggtacttccactttatcaattaagcgttgcgtcactttcactggagaatagccttccatttcagcttcggcagtcaggatcagacggtgctgaagtacataaggagctacaaacttgatatcttccggtgtcacaaaatcacgtccctgcaaaagagcatacgctttcgacgattgcagcatggctacagatgcacgtggagaagctcccaaatatacagctttgctggtacgggtctgctgtacaatcaatgcgatatattgaagtaacgtgcggtctacaaatacctgattcataaaagcacgaagcgacagcagttcttctttggtaatagcgggaacgatgtcgtccaacttcaccaatgcggcattggtatgatgacgttccaagatattcacttcctcttccaatgaaggataatccatcgttatcttcatcagaaaacggtcgagctgtgcttcgggaagtttgtatgttccctcctgctctaccggattctgggtagccaaaatcgtataaagatctcccatccggtgagtcgttccatcaatactgatctggcgctcttccattacctcaaacaaggcagcctgtgtcttggcaggagcacggttgatttcatcgaccaatacaatatctgcaaaaatcggtccctgatgaaaatcaaaaccattggttttcatattaaacacagtcgtacctaatacgtcactcggcattaagtccggagtgaactggacacgactgaagtctgcatcaatcagacgagctgtcaaacgggccaacagtgtcttcgcaactcccggaacaccttctatcaatacgtgtccattagccaaaatcgctgtcagtaccaaatcgactgtctgctcctgcccaactatgacggaagcaatccggtctttcaactcttgtatcttctcggaaaagagagttaaatctactcgctgttctgtattctcttccataaatttcttctttagatatgattgattatttcattcattttatcgatatataccttcatctgctccgcatcaataacacgtcctccgtaaatcacgggtctgacttcgcggataaatttagcaatctctccggcatccattccggttttccgggcaatccggtgaaaagagcgttcatcgtcggccacttcttcaatatccacctgaatctctctccgaagttcttcggctaaataggaaaacttcttgcgaactaaatccgcatggtctttcttctgaaagtaaagcgtgcctatcagttcggtaaattcaagagatttattggccggctcgtgaacaacagggatcacccgttgccgcctcttcgctgtgaatatcataaagagtatgatggtaatcatcgtcagatacaaagcccaacgaagcggttcatgtgcaagaaaataacggaaaggtgattgctgcacctgtgcagtttctttcatgtacccctccgtgcgaacgatgggaagcttccccatctgcgacaacaaacggaagatataggttgcatttttgccgtccaacattccgtaattggtaaaaatcaaaggagtggaaactaaaataacttctcctttcccccaccgacgggacatcgctacaggcatataaacaagactatccgttgtcaacgagtccgcctctgtttcataccggaactcattcgactcaaaaactctttgtgccaacaccctttccggaagtgaatctccccaaaaataagaggagcacaactggggataaaaatagaaagtctgacggggataaaccgtcgaatctcctatccaatgcaagctatcttttttcaaaaatgaagttgcatatttcttcaaagccatcggactgaagtaagaatagtaagacctgaactgtaaggtatcttccaaatatctgccgaacaaggtactcaccaacatgaccttatctccgcgttccgccattttcaacagagcgtttacatcgacgtccgacaatcgcaaattatcagagataaccaatatacctctgcgttgcgtcgtatcttcctgctccaattgatagagacttttcctcgaaaaagtgtagccctgtggcaaagaagaagacaatacactatcgaatactgcacatccgaaaggttgctcatcatgatgtccgaaagtgggcttccacacaaaattcttcggcaaatgatattctattgcaaacatgatgaatagaaaagcgacaataaagacaatgaaccagcgacttcctttcatgagacgcctcctttccctatttcttcctgcaaggtctgcattgtccggaagagttcttccgtcgcctcaaagttgccataacgtacccgcaggaaatgattggtcagttgcctgaaagccggtagccggacttcattgatatactgggtaggcgttttataaagttgccagtcaatacgttcagcgtcactaagttgtttcaaagtttgcagatagagcaaacgtactgcttcccggtaattctgacgggaaagcgcttccgcaatccctcccggaaaatctactccgtaaatggtgtcttcttcaactgtataaggcaacgcatttttatgcgagaccataaacaattccgggcgtttccgatagacgaaccaaacaatcagcaacaaaagaagaatggcaatacataccaggataagccctgaatactcttcagcaaaatgactgccgaatatcttacgcatcaattccccaaactgtcggctgatccactcaaagacattcatctccggagtaatcagttcacggttatagttgtatgccggatcagactgccagagggcaatctgcgccgtatcacagactagtgtatcagccggggaagtgagattcatctagtggagatttggtttagagtttatcaaaattgtcaatatcactttctaccgttatgctgtccaccacttccgatgcatgaccatactgataaaccagaccgacgataccgaatatagccgataagtaagaaccatacaacatcaggatagagaacaaatactgcgcaaagttcagtccgactgatgaagaggtggcacctccgtcactcatcgtaaagatcatttttacaatatagatcacataccagggtatagaaacgattccttgtaacacactggcaataatccccatcacaattaaaattagaaagacgcctccccaggtagcaaatcccaaccggaatgtttttgcaaatgcctcacccaacgaaatgtcttcaaataagtagatgggagccattaatgccaaaggaaccataaacgcgaataaaagcgggatggtcagaatgagtgtgaaaggtgtcaatacagccaataaaacaataaagatcaccgcaaagatgaataaaaagctgcaggcgatccccatcaaaaacagtcttttaatattacggagcaacaacgattttatatcgccgaatacaaccccgttcaggcgttcttcccgttcattatacaatcgtaccatcgcataaatcaaggaagtcatcaacaaagctcccaaacatgaaaaaaagataactcctgcataattcagtgcaaatgaaggtcccagagcagctaaaggattatcacttattcctccggacgcctgcatagcagtaatatctgtcatacttcccattaaaccgctaaagtttgcggcttgaattaagcatatagggagtatcagataagttgaatacttaaacaattgtttccaattctcttttataaaatcaaaagaagcgttcaacttctcaccgaaaggacgtttcacgtacatcgcaatcttaggtttctgtgattccatgtttttttctatttggtaaataaatatagtagaatataataaatgccagagaagtgaatatcacgccaagcctcaacacatcgggaagctctgtgtgccgggtaagaaaaccttctataaagcctgccataatgaacaccggaacagtgccgatcactattttcaagcctcgcttcgctcctcttctgaaagattccaagcgggaataggtgccggggaacaaccagccgttgcccaaagccaatccggcggcaccggccacgataattgcccaaatctcaagcgttccgtgcaaccagatggctagactggattcccacaacaaatcgtgttgataaaagaatgtttgaaaagctcctaccatgataccattggagagaagcatataccctgttccaaaactagtcagcaatcccattgcaaagcagttgaaagagaccatcacgttattaagtgtaatgcccaagaacatcggcacttcggaagaaccattatatacggccatcggctccccattggcaatattgtcgagtgtcatatccacataaccgtttcccaatatcagccggacaaaatccgggtcattcgctgctgataatacgccgattaatgcgctggcaacaaaaatcaaaaaggaggtcagtaattcgcgccgtgcatcgtgcatggttcgtggcacttcctgtgtccagaaggtaataatccgtgtccacttctcgcgtttattgcggtagatttcgttgtgcaacgctgaagccagattattcagataaatagtaatacgggaagttgggaaatgtgtttgggcaaatgccaggtcagctgtcaagtccgtatacgtatcggctagttggtcgggggacagacttgccgcccgctccacaactttctctgtctccttccatttttcaatgttccgacgaataaacgttacttctttcatgcttttcaatagatttcggataagttttgtccgaaaccggaagcaaaaataagagaattatgatatatttgcaacggaatcctaaaaatgtttaacctgaaatggcagaatctacgataataaccggacaattcgttcgtatcagccaaacgcccgccagtatcggcgaacgactgatggctttaatcatcgattattttctgatcgggctttacatcttgtccactattacgctcttgtctaaattaagtttaccgtcaggattcagtttgttcttttttctgtgcgtcgtttatttaccgattctcggttattcttttctttgcgagatgttcaatcacggacagagctttggcaaaaaactcatcaatatccgtgtcgtaaaagtagacggttctactccaagcatcggctcttatctgttacgatggcttcttttcccaattgatggtcccatcacaagtggccttggacttctggtcgttttattgaataagaacaaccaacgattaggggatctagctgccggcactatggtaattaaagagaaaaactatcgtaagatacatgtcagcctggatgaattcgactatctgacccaaaattatcatccggtatatccccagtcggctgatttatctctcgaacaagtgaatgtaattacccggactttggaatccagcgaaaaagaccgggcaagacgtatcacggcacttgccaaaaaagtacaggaattactttccgttactcctcgtgagggtaatcaggaaaaatttcttcagacgatacttcgcgattatcagtattatgcattggaagaaatataaccagaatacgctgtttcagactattcaggcaagggattattctcactgtagtgagaattaattctcatagcaatgagtattttttctcattatagtgagaactttttctcataacataaaactgtttgagaaaaagcccgcaaaaaaaaaggggtatactcacagagcacaccccttatcttaattttatctgcaatgagaccggacgtcgtttagtccacctgtcccagagagtttccgtattccatttctccctgaaccacaaagaggacttcttcaggatcgtattcccctatttcatcctttttggcttcttttacaatgtaagccacaacctcttccaaatcgatgttgacatagccgtcttcatcgggttgagcgtcgagaatgccactttcagagtaatactcgtcgattaaatcgagaaaataatacaattcatcgtccgagaacttctctttcagttcttgaggcagatagtttttgataaactcgatggtcttttcgtcatcggcatctgctaataaaaaatcgtcttccagtcccatttttttaagtattaagtgataagtattaagtattatcgactataaaagcttcttcaccttttctgcgaataccggtttgccaactgcacctacctgtttgtctactatttcaccgttcttgaaaaacaatacagtaggaatattacggataccatattcagcagccatatcaccattttcgtctacatcgcacttaccgatgattacttgtccttcaaactccgcagccaattcttcaatgataggagccaccatcttgcatgggccacaccaaggagcccaaaaatctacaacaaccggttttccttctgcaagaacctctttatagttgctgtctgtaatttctaaagccatttttttaagtattaattattaaatgttatttcgttagcttattctcgccacaaatataatcaatttatcctattatgatagactttaattggaagttttataataatcattgagaatcatccatttactggaaaagtctaatttcacccctaaaaatgaaccttaaataattaactattatggtaaatatgaagcaatgacaagcatatcattcagatatcagccaactatcactgaaataataaatcaatcctttctacaacaactcccttattcttctgatttccgatattgtacaattcctctcgaagtgaaacttgaacaaattcgataatcttccaatccaacgcaataccattattctcttgtgcagaagccggataccaataaggattcactcccggccaatcctgcggtaacatagccgccttagtcggtacaaggtcggataccggaatcagaatatccgatgcttcagctttcaaattaaacgcagcaccatatcctcttccctctttatctacaaaattgcaaatggctttatcagtattgttcaatccataagcgcgaatacgaatatatgcaggagccgtcttacctttactccgacaagttatccgatcacctatataatgggaaaaagtcacatcacaaggagctatataatctccctttttctccaaatcaggaacagaaagctgaaaggcaggcagcaattccggtcctgatattaccgagctgaattgtgattcagggctcctgaacgtgcgtgtacgacggatatgcttccaattgtcctgtggtcctaaaagagacaaaggagttgtttcgtttatcagacgcatggcgtaagtagcttgttcataatagtcccaccgttcgggagtgcaatacgtcttttccggaaacaagattgtatcatctcccgtatctatgccaaaatgatactcataatcccccttagcaagccagcttatatcggctttcgccgtatagaagaagccgtcttccgctgtcatcggtatgcgcttgcatccccaaggtttcagcatcagataaacatctacctgttgaggacgtttggggccgaacacctcacaccggaatgtcacctctttatcagctgtaaactccgcccatgtatgattggctattttccactctttcatcggagtctgatagaaatctttggcaggaagttcttccctgctaactatctttccatctgacagcagatattttccgggcaatacaatcatttcagtttccagaccgggaagctttatttgaatgttccgttcattgtacgctgattttcttgacaccctgtgtttattcagcattttataaggatcatctatatccattatatcagggtagatttccagttgccaagtattattatcctgtttgtcaagaaaataaatacctgttcccgagtaacggactaccggagaagagccgactccggcaatatgcttcaatgctgccagatttttgggacgggtagacgtagtatttgaataatagaacatatctccggaatttaattcgctcaactgctcatcgtaattcacccggaaatcaccgaaagttctgttgtccggataatacccgaagtgtttgccacgcgggatacgacgcatcacttcagcggcaatcatgctgcttaccgcctttgaaggagtaaagaccatattgaaaaaatgagtctgccaacctaaattcatcggggctgtacgcagcatatcataagaaaagatggcagcaaactggataccgcccctacggaactcacgcaccatagccgggaacataaaaccggaagccatatccgttgcatcaaattcataaacaatttttgcttttccgcgtaaatcaggatgaagcatttgctcgtaacggtcaacgaacaacaaaccgtttccttcaatggaataattgttattcaacgcactcggataccaagcgtgagtagaaccttgtatatccgatttccgaatagcaggagccacacggaagtcttgactgacattatagaaagtcagcttcttacaaccggtactccggattgccttgcacatccggttgatataacgcaccatacctggaatgtcttccggaaattgggtaggttcgttgataagctcaacaaacaatatgttcggctcatccttcagggagcgaccagtataaggattacgatgattgagcagttgcttcatgtagttttcctgtgcacgaatagcttgctcatcgtgtataagtgtatttttaggataatatttagccagaccgatatttgtcgtatcactcatttccggccattgtgaattataggtcacgatagggctaagcaacatataaatatcccgtttatccgcttcggcaatcagatagtccaacagatgcaaatgttcgttctcttgcagattaccctcacgatccgtattctgatagtctccccaaaagcagagacgtaatccgtcccagttcattcgcttgaaatgttccaggtcttccacaatcatttgcttacgttcaccgccaacataacctgccgcacgaaaatcgcaagcagaaggcaggcaataattggcaccgaataaggctacttcctttttattctccgtccaacgtatcacgccctgcttgtccatatataccttctcggcacaatatcccattgtgccgagaagagttattaataatgtaaataagcttttcctcatgatatttatgattatgatactaatttcagggctacaaacccattacaaattgttctccccaatgcattaacagattatgaccggcgttattaagatgagcattgtcatctttcccttgaaaatagcgtgaccggaaaaccgggtcattgggattgataccactagtatatgcagcatttaaaactttgacgtcatttttacggcatatttcctctatgatgtttattgtcaccggaaatccttcataggctacattccagggagtgacccaaccaattttggcaccggaatacttccttttcaaccctttcagcagttcatccaaacgttggcacaacactttttgccgatcaatatctccgtttaccaaatatgcatcattatgaccggcaatgatgagtatatagtcagcgttttccggaataatactgtatcgcttatataatggtgctccatatatactgtcacgctcgaatgcgatactgttgccgttttgtccgagattctgatacttcatgccatgctttgttgccagtttataatgccaagtctctgaaacaggacaaccatggttatacacataactatctccaataacgcacatcgtttttccttcaagcgttttttccttcatataactcactgcgaccggtgctccataaggattgatatcaatagtaagataatccccccgatatgatacttgaaggtttttgccgccctgaacagctttcatgcatcgattcttttccattccggcaaccttcaaggtgagtggcatacggaatattttgctatcaagactcaagactggagtaattataaaggtgttattacaccaacgagttgttagagtgacagcattccgttctttcacataagcttgaatattcgagaaagtatcaacccataccgagtctttcttgaaagcaagttcacgaaaaaaactccatagaacccacggctcattccactgatcccacgctgtataaatcccgtgggccatggtcaccccccaccgccgatcatgaataagttgacgtaaccaagtatctattgatgccgcagtgcaacctgaattccgttgtccgagaccgaactgttcaaggcgtgcccccaccttcccttcctcgcagacagctctcacttgaggtgtcattgcattgaaagggtaaagaatgcttgtgggttttactcctgtctcggcctcaataatggaatcattctttctaatttccattaaaagagtacgcctgtctatagctgtcaagttaggatgactccatgaatggttacatatctcgtgaccgtcagccaccatgcgcctacattcttcccaagtgagtcgaggggcaaaatggtcatcaatatcccccataaatttgccatttatcccgaacgtgccccgaagtgcataccgattcaaatggggagctactaaagtataatgttcctggataccatcatcaaaagtaaggctcactgcggcttgacgatcacccaagaaatcagcaacacttactgtttgtgacttgacagaaagagacaaaaaaagaaaaaagattgtcatgcagaaaaactgcttatttcttgttatcaagtactccgttctacaatctggcatatcgctgcacatttttttgattttcatgattggatacgaatcagtagttgaaagttcggtttcgatttacattcaactactgattcacatgaactatttatttatctccacttgatattgaggaataatctccacgttcttaatttcaagcacctggttatttcctttaaaatcaggaatagcagactggggcaaatcttgcagacaagtagcatccgaacgcaaaggacggaagtagaacgacatagcttctttgttcatcatctctttatggcggttaagaccaatcatccatggttgggcatgccagaattcatcctgtaccatctttccgccgaggaaggccattgccacatcacccgtgtaatctatcttcatgaagtattcattcacttgcggggtatgaacggtatcactgaaagctacggtaatacgacgagtggttatcttctctacacgacattcggggctgacaggctgaacctgtactgtttgtgattgccatccttttgccgaagggtacaaaatataatcaaaggcgttatttccaagttgttgcagggtgataccttctgccgtcggtaatacggtagctgtcgttatcaatagttgcccgtccaccttgatggcattaagtgcctgttcatgattcagtgtcgttatttttattttcttaccgttacggggtgtgacagtaatagtacttttcagaccgcttgtgacggtgtatttagccttacctttgacggtgcgggcatcaaaacaatactccggtttcataccttccggggcgaagaaaatataatggtcgataccgttatcattgattttcatcagaggttgtgccgtagcataacgaagtctggcacttccgagcatcaagttaaatggcagaatcatgctttcatctttcggcaatgtaaaagttccctgttcaggtatgcgtagtgtttcattccgaagattcagttgcagttgcagaccgtccatatcatgccgcaatgtgtcatggtcctgaaagtttatcatgaaaatgaatccgctgtcgtctttcatccgggcagcataacgcaagtcatcacgattttcgggtgtcattttatcccaaccttccggtaatacggtttccatgggagcaagattactgccgaaatcggcaagaaacgaatggatggtgcgcaggtaacgataagacggatgttccagtccgaattcgccaagaggagcctggaaatcataggagattttgggcatccccatcggttcgtcctgataacttcctatattatcctgacgtagtggagtgcttcctccgtgatacatataatatccgatgccgttgcttccgctaccgagcgtacgaatcatcaacgcctgtgctgcacgtgccgtaacgataggtctgcgtcgataaatcatctgtattcctgcacccatttccgcacagaacgaggggaatcgttccgcatcataacgcaccggagcataatcaggcacacggtgtatatctttgaacatacagaaaggcgacattctcggttcttcccaaaaaggataggtgtaggcggatgtcacaggaattgcttcattgtcaataacagctgcgtttccccagccggtggctgtatagaacggagtgataataccttcttcctgtgccattcttttaagggtacgcatgtgttcctccccaagttcggcggtagtgactttcttatccattacacttacgccaatcatagcatagtcaatgtcataacttgccacagtaaaatccaacggttcaccgggataattcactccccaaggagatgcagaatgctgcatctcattttccaactggcaaccgatgatcggaccgccatccttataatacaatccttgcagttgccggcctatctcgccataaagtctttttacgtaagagaggtatagaggctgattgctgcgtacatccaccggacgggcgaaaagccagtcgggtatggagccgttacgtatttcaccgtgacagaaagggccgatacgtacgatgaccggcatgtcatgcttcttgcaaagttctatgaaatggcgtaggtctttattgccgctccagcagaacttgccttcctcttcctcatgtaatccccagaaaatataggttggcaatacattcaccccaccggctttcatctttacaatctcctgttcccactgtgcacggggataacgggtaaaatggaactctcccataacaggtatcacaggctttccgtcgatagacatataatagctgtttacggaaatatttccacccgacgggttactgccccccatcttgaggtgtcccgtatatatagtcttctctttcaccggagcggaaagctcataaatctgctgtgcatgaaaagtggttgcatatagagcaaacgctaaagctgcataaattttcttcttcataatatgtgtttttaatgatgtaattcttatttaatcagagtcaatacttgattcgcaattgtttccattccttttacagtaggatgcccgctttctttctcgattccttgcagttgtacgtattttattccgtaatgttcgcaaacaaccttggtcgattccacaatctccgttttcaagtcatcactgatgataaagtaaagcgtcacattgggataatgctcttgagccaactctatcaatttagccaatgcaggacgataggtatacagatcggcacgcttgaaatcttcatatttgtactcaccgataggagtgtttgcccaattgtcattgattccaccgaagatgaggatgatatcaggattccccaaacggggaacccttgtaataaatgaacggtcggcatagtcctcgtcattatatcccgaataggatacagtagccccgctataggagtcgtttgctcccaacttgaaaccggctttcttgatgacctgccaccaccacgtctgtttcacattcactacccctgtcttagaccaatcggtagttgtgtaatacgttttattggtgtccggtatatacttctcaaaggtagaatatgaatcgcccaagaccgcaacagtcggtctgatactttgcgctaccgcatttaccgtaaacaggcaggcaaggatatataagaatatatatttcatggtttatctacttactactatttactatctatcataattattttgcttgatagcccctttggactcatcaatgaaactctgcggaatccagaaacggttgtgtccttcgtgtacattgaagtagccgcgtccttcggatttattaatggcatcaatgcggttattggcatattccacatactttccaaagcgaatcaaatcttgacggcgaagcccttcgagatagaactcatgaccgcgttccagaaggatggcttcattgaaggcttcaccggaagctgtttgagcgtcatccagttccgacaatccggcacgcttgcgtacacggtttaccaaaccaatggcttccgttgtaggactgccctcattacggttgatacactcggcaagtgtcaacagcacatcagcgtaacgatagataaccacgtcaatgccgctttgcccgtctttcatatccggatccataccgtatttcaagggtagtgcaccctttgccaactgactgctatttgagcggtctatcttttctccatttttattcgtataagcagtcactacgtttttcagacgcaaatcgccttcttcaaatgtgtcataaaaatcccaaggcattacatagccaccccaaccggttgccttttcagcccaaggataatcggcgggaagcacttcggcagtcatgtagttggagtaccaactggcggtattgttgcaagccagttgcagaatcacttcattgttacctattccctctttggagaagatatagttataatcaggttgcaggctatacacacgtccttccatctccaacaattcgcgggctaaagtttccgctttatcaaagtagccttttatcatgtaatatttcaacagaatcatacgtgccgcccctttcgtcatacgtccgcgtgcctccgccacttcgggtaaatcacggattgcatcgcgcaagtccgcttccatcatcgcgtcatattcttcttctgtcagacggggaagatagacaaaagtctgcgggtcgtccaacacctcatccgaagccaccggcacaggaccgaacatatcataaaggtaaagccccatccatccgcgcaaagccttcgcctcacccgaataaagcgtttttgcgtcttcacttaccggagagttttcaatacgacgaatggtattacgtgctttcgaaagaaaattataacgctcgaaatttgaataagcatgattctgaatactgcctcccacagtagcataccactgctggaaataaagttcatccgactcccacgcccagcaacaccaaagcacatctgtcgtcatatcacctattacttgatatcccatataatccgccgaataaacagccttgaaatcaccgggattaaaatcatagtaaagcgagtttaccgccagtttcaagtctgtctccgtcttaaagaagttttctggagagatttcggtatagtccaagcgttccagttcacaggaagtcatcgataacagcatcaaggctgttgctatatatttcattgttttcatacccagtatatattagaatttcacatccagaccaatagcaaatgaagactgattcggataagctccgataccgtttccggtttcaggatccattcccttataaggagtaaatacggctagattgcgccccgcggcatacagcctgactgaacgaatcttattcttaaaccattgggcagggaaagtataaccgattgacacattatccaaacgcagataccaagccttttcgaggaaaaagtcacttttcttggggtcaacgcccgaagaagcctccgccacacccggcaatgtacccataggattggcaggcgaccaacggttcttcacctcatccaaaacattgacgccatacgttatgtcttcgataccatagatggactgtaacttaatgtcgttcaccttccatccattcagcgaaccatagatgtagatgttggcatcccagtttttccagcggaaagtattattgatactgaaaggaatcggggtactatttgccaataccaccatgtcagcttcgtcgagcacgccatcctctcccgctgttcggatataacgtccttcactatctcgcatcttttcgcccttctcatcgagttggtaaccattcaaatcctgatacagaatagctccggcgccggatttctgcagatggttataagtccggtccatctgaatcaggccattcgtcctgtatccgtagatgttgtcccatctttccacataatcctgatagacagcaggaatgaagtccgggtcacgtttcgttgtgtgattgcggtaataggagaaattgatgtcggtagtccagccaaagttcttattatcgaaatttacactgtggataccgatatctataccacgggcacggtaaacggtcgctgaattgtaatctatcgtcttcacttcctgataggacatcaaatttttctctaaaatgacatccttacgcagacgttggtagaggtcgacagacccggacagacggttgttgaagaaaccgaaatcaataccgaagttatagtcggtcagtgtctcccatttcaatttatcattgcccagtttggagatagccataccgtttaccaagcttccgttaggtgcaaatgcgccttgtgaaactttataataagtattgataccggtgaggttgcctgcattaccggtttgtcccacacctgcacggagtttcaggttgctcaaccaaccgatatccttcagccagttttcttcattcatacgccaggctgccgatactcccgggaaagtgccccattgatgctcctttgagaagttggacgaaccgtctatgcggagattgacagtcaagatatatttagatgccagcgaataattcaaacgtgcaaggaatgaagccatttcactagctcccttatacgagctgatagtcggtttttcctgctcacttgtcccgatattgttcatcaaagagccgtcgtatgggaattgtgaagcgacgatacccatcccttcccaagacgacttcttgtattcaaaaccagccatcaggttcacgtcatgtatttcattgaacactttcgtgtaattggcaatcacattgaacaggttcatttgcgatttcgcattttgcttggaagcctgaccgtccacactatatccctttttggtcgtggtgggaatatattggtcggcctgcacatctttcatatcgaaaccgacagtagcctttatcagcaaatctttgattggtcggaattccagataaccactgacaaaaaggtcgcggctcactgtctggtcggtaatatccaataatgaaaccggattcggatagatgtcacgaatcggatttacggaatatttaccctcttcatcacgtaccggtacggtaggaataaatgtcatagccgaatatatcagcgctgaattatcctgccgtccatcccccaacggtacgtcatgatactttatctgcgagaaagtggaattaatgccggctttcaacatacggttgatagtttggtcaacattcaaacgcccagtgatacgattcatcgagttattcttggcaattccctgatggtcataataactcaatgagaacaagtatttcgtggcgtccgtaccggcagaaaccgaaagattatgttcattaacgatacctacacgggttacttcatccatccagtctgttccgtcgcctacgaaattagcaatctgcctatcagtatatttcttttcatccccacgccccagttcatcaaacactttattctgttcaatcataaaatcacgcgcattcaggaaatccggtgcatccttgatatactggaaagcaaccgaaccggaataagagatgtcgggcttacctgtttttcctcgtttagtggtaatcagaatcacaccacccgaagcatccgaaccgtaaatagccgctgctgatgcatctttcagaatatcaatcgtctcaatgtcattgggattgaggttaatcagagcattgtctttctcaccaccactatatgccgttcctgttgtcactgtttttgttgacaactgcggcacaccgtcaatgacaatcaacggactttgtcctgaaagtccaccacgaatggagatattcatcgaaccacccggattggcactgttttgtgtgatattcattcctgacgaacgtccacgcagcatggaacctaccgaagctgatgcagccgtcggtaattcatcagcttttacggaagccaccgcaccagagatactgctctttttagtcgtaccataaccgactactacaatttcatccaatgttttagcgtcttctttcagaataaactccatgggtgtagcggatactttcttctcttgagagaggtaaccgatataagaaacggtaatcgttgctcccgaaggtacgtcagacagactgaacttaccgtccaaatccgtaatggagccgttggtagtacctttcaccactacactcgcaccaataatagcttcaccagccgggtctttcaccagtcccttcacttggatattttgtgccatcagtgaagttgccaacaacaggaaggtaaaaaagaatcctgtcctcacacatattgaatatattgttttcatagttgctctctttttattctgttattttcttgattgtagcccaaagaatagctgtatcgaaggtgatttgcaccacaccgtcataatcgcttgcatagcttgccactccaccacctgcgcttgtggtatcttcccaccagccgcatccagtcgcatcaccccaatagcggagaacatatccccagtcggacacacgggctgcatagtattggcgcgtacttgaataactgccgatttgatgcaaggtagaagtataacgatatccattgcgcgccatctctgtagcaggcgtaccccaatcggcaaaatcactgaagccacagccggacacggtgagcgatcctgtataggttgtcgctgaaggttccagtttccacatgctataagtatgtgcctgtaaatcaatccaaacaccataatagcctgactcagcaaccgtagcaggcaccacataaccattgttattcatcagttttgaattaacgtaaggacttacaccgaaaaggtcaccgtccatcgtcttctccgccgtaaagtagatttggaagttcgccttgtctgcataaatttttccttcatattggtactctcccttgcgggtcatcggtgcatagtagccgtcgaggtagtcgtcagctttctcggaagcattaaccacccacattacagagtaatcttcgaatggatcttcctcctctgctagcataacaacaaccgtagtagtgacaacagtttcattgcctccggcatccgttatagtcaaagtgacaggaaattctcccgtagtaaaatcaatagtacgtttcaattctccattacgcccggttacttttaccgtctcatctatttgcatactagggatttgaagacgaacatctttcaactcgcgatcatcggtgaacttcacattcaaattccagcttcctttatttgcaaccgcgtcaaaatccactgctatccgcgacggaagttgggtttgcataatcgggctctccatatccgctacataagtcagcaacacattcttcttgctttcccgaccgtctacgtcacggatagtaatcaataaatattcttcaaaactagcgtttttcggtacaatgagttgataatcataattaaagactttaggcttctgcccgcccaattcatatactttatgaatcccccattgttcacaacttaatgtgacgctttccaatcctacataattagatgcggttcctgataccaaaacggtgtcaccgggaaacgtctctatctcatcactcattacataaagaccgggagccacatcttccttatcatcatcgcaaccgacaacaaaatacataagtgccagcaacaaactgatttttccgaatctacttaaaatattcttcatggtatcttccttttagttgttatatttgaatgcatccaatacttccaatctatttccttcataaccaaacaaggtggtattgctcacataattcttggcacccagttcccatcccatgccttctacttcgataaagataggatcccaataaagaaaaccaagtatgcggcagtctttcgcttgctttatttcttttatttgttcaagcatgaagtttttctgtccaagcggggaaaaatccaaatacggcccgttgtccgacagttgcccctgagttccgtcaggcaaagtcttgtcccagctatatccagtttccataattaaaatatccttatcaaatttagctgtgatataatccgcccattcacgcatttgtgctaccgtatttttcgtccagaaaggataataagaagtaccgattatatcatatttcgtatttctttttttcagttcaccataataccagttatacaagtctttatctccggcacctgccgagtgaataatgacctttgaatccggtgatacagctttcaccgcatcataacctgtattgaatagttcggaaagctgcgcaaaattgtcacaacttccatccggatataacatgccggcttgtacttcattacccaacgagacaaattcgggagtcgtcccctgtgctttcatcttattcatgaaatcaaaggtaaaatcgtagagtgcttttttcagtccatcaaagtcgagcccttcccattcgtgcggtttgttctggtcttctccatttgtccagtaatcactataatggaaagtcaactgtatctgcataccggcttgtttagctctttttgccagccgcaaaacatcttccggtcctgaaatacctgcaggcaaacggttggaaggagaatagtccggatttcccggatcattgtacagacggagacgaacaatgttgaaaccattattcttcaagatttcgatgcagtctttttcttcaccgttttcatagaatttgccacccatctgctccacgtaagtcagttgtgagatatcaccgcctttcagcagattaaattccttttctgttttcttcaaacgcagtccgtcaaagcggctccagtttgcttcagccgattcgctatggatttcaatatcacatttaccgccttccacttttatcccgcgcacataggagcgaatccaggtagaaggagatgcttgtaatgaagtcattttcttagtatcggtgccggctgccacataacaagaggcttgtcctccggtactcttataataaaattcaaggtcataaataccatcttccaaaccgttgacagtttgacaggtggataccgtatatgacgaagttgctccataatgtaaagcatagttgccttcacatcccccttgtaccacttttgcggcagaatagtccccgcttactgtccagcctttaggagaagctgtttcggcagcgtcttcttcaaaacttccgttaggtactttcaccactgtaacagcagggtcgaggttagcgactgctgccggatcatccgaacatgcagccgtactgcacataacggaaaagccaattgcaataaagcctgtaattttcatgattaaactgtttttaatatttctcatgtcattgttatttaaggtttatgtaaaaaggagcttgtgacgatgcttaaaattaaacatcgccactaagttgtcctaccctatcaggcttctaaaagcctgaatcccctgatgattaatatccaatctttctacctcacttaataaccggacggatttctccttctggttcagtccccaatatcctaatgccatcatatatttgcagtgaattacgttccttatcgtcaagtcatcctcccaaatcaacaagtcgggtagcgacactgcaaaataatccattttaatcttgtcaaacaagtgtttttctccataagaagtcaatttatgaaagcggccgttagcctcatccatacgcccgagcttcaataatgccagaccttgatagaatatcttatcgggtttcgcatcgttgtagtacatggcggcagccggctcggtaggtccgatgattgcctgttcccaacattccacagccttgtcatgtcgtcccaatccttcataagcgcaacccaggaagtagtaaaagtcgttttcctgtgcaccatacaatttgccttcaccaagatgatggggatattccagacattcttccaataatgatattgcttctttattctcaccggcagttaatgctttctttgccaattccacacgagccagttgatattgggcaggcacttttccttcgccaccctcccagggatggaagttgtgtgcatccaataccgctttcgccttttcgtactctcctgtctgattcaacaaggtgatttcttccagtatcaggtcatcacgctgcttaataagttcaggatattgttgcaggaaagctaggcgctctttgtgcgaacgacggacacgcttgtaaagttgatcgagttccatcaagatacgtgcatcggttgtgtcaaggcggaaagcacgttccatacattcgatggctttcgcttcctcatttttcttgttgaagaatgccaaagccaggttacgccatacggtcggaaagctaccgtccagtcttgcggaagtttcccatgcttccatagccaggtcgtactggcgcttgtcgtaatacagattacccaaatagtaaggagctcttgcatcgtccggattctgtaccatggcacattgcaaggcaagaattgcttccaaacggttgggaaaacagtagtcggggcaagctttgactgcatcggcaaatgcctgtttcactccggaaagtcccccctggtgcaggcaccaacccaagtaatagtaagtcatcggagtaacaataccctcggcaatggctatattccataaggaagcagcttcctgccagcaacctgcggcacaatagtcgagagctatttcatcatagttgtgaggttcgccacgcatcatctctttcatgacagacaattcgtcggctacgttcgtaatcaggtacttctcgtaacgacagccaaagttgaatttatcaatagccaatgaatcttcaatcagttgcagagcttcttcggtgttgtccatccggcggagaattgcagtttttaaagcacgggctttatgattatgccagttgcggataagcgagcggtctatttcgtccagtgcatcctccaaacgattctgcaggatagaaatctgcgcgcaggcaaagtaccccgcatcctgccaggcggcattccaacaagatttatagaaacggtcgtaagcctcattgtatcgtccctggtatttcaaggcaagaccgagattatagatcggttctccgtcgtatggattcggattacgtttctgtaaggtctttacggctgtaagcaagtattgctccgctttatggaaacggcctttacggatataccacagaccaagcgcattgttattacgcacatcaatcggatcacggcgcaatgcttcttcgtagtattctacgggattgtatgtggcatgtctgtactgttccaagtgtaagccggtcagataaagctgttcagtagtctttatttcttccgggagcagggctgtttcagcagcgtcgggaataggtttcacttcttccggttctgcatgccaataaagtaattcccttccgtttgccgtgatttcaagaatcagtttgtcgagcttctcaccattcacatttaccgtttcatccagcaattcttccggagtgatagtcacttccttgctataatatattttcccgtcttcacctttcaagacaacatttaccgtttggcacgaagtagcaaatatcttgaagcgaacgctgtcctccccttccggttcaatattcatcagcaaatccctgctggcattcttcaccactcccaattcccggtaaggcaggaaatattgaacgaagctcttttcttcgtaaggttggagccaggtaaagtccggttgattttcggtatagacacctgccatcagttcaatgtacggcccgtcttcgtccgtcaggttgcggtcccatgcgcggccaaagtcgccgtttccccacgtccactgtttcttgcccggagaaatgtggtggttcgctacatgaagcataccggcacgagtatcattctcatatccaccctcaaagttaaagcgggagttgacagccatataggaagtaggaaccttgatattcttatagttcgagatatctactccggcagaataatccatcttgtagtaagtacccgttgcgatggggaaactggatacggcacgctttccatggtcgaaaacggcattgatatcgggcggaaatacgctctgatagtagtcgttcaccgctacggcagggtttgcccaccacaggaaggtctgcggtacttcagtacgattgtaaagtactcccttgatttcaagaaaagcatgtcccggacgaagcgtaaaacctgccattcctttctgatgaaacatacgttccatttcattcacccatactgtaacactgccgtcggcattttcttcaatagtagtatctacgggcatgtaggtgctggggcggtgatgttgaggccagttaaactcaatgccacctgaaatccacggtccggcaagccctaccaaagcaggctttatcacatgattataataaatgaaatgacgttctctaattttatcataagccatctgtacacgtccgcctaattcgggcagaatcatgaccttaatgtattcattttcgataaaaatagcattgtattccttatccactttctcattggacatcgattcaatcacaggataaggataaactaccccgctgctgccttgatacacacgcttctccaagaagatcggattcttctccggtttgcctacttcataagtagggataaccaacttttctttccatgcttttaccatcgtattattgattataaatttgtttttttattcgttgacaaagagatcaagagacaaagagggtcaggggcagggagattttacattctccctgcctgattgatgatgttatccaatacctatttacttacttgctaatttgccaaactgttatttttttatttgattaaatccttttccaatgcttccagtgatttgcctttcgtttcgggcaacgcacggaagaagaacaaatagccgacagcacaaatgactgcataaatccagaatgtaccactgcttcccaagaaattattcagtaacgggaaagtgtatgtcagcgtgaaactacctacccacaaagcaaatgtacaggttgccattgcaacggcacgcacccggttcgggaagatttcggcaagcagcacccaagtgataggccccagggacattgcatagcaagcgatagccagcacaacaagtaccaccataaagaatccgcttacctcgaagaaatagcaagtgccgagaatgagataaatgccagccagccctccggcaccgaaaagcatcagagcgcgacgtcccaagcgttcgactgtatagatagccacaaaagtaaaaactacattcgccacacctgtcaccacaatattaaagagaacatctcccaacgaataccctgcagactggaatatctcctgcgcataattgaagattacattcgtaccgcaccattgctggaatacagccacaataatgcctaaaacaagtaccttgcggaacggacggctaaacaataaccgcaatcctccttccgacttcgaagaaccggtttcttccaccaagcgaagttcctgatcggcataatcatcaccacccattttactaagcacattccatgctttctcttcttttcctttcatcgccagccagcggggactttcggggatgaaacatgccaacaacaagaatatcgcagcagggaaggcagccgcccaaaacatccatcgccatcccatctgcccgttccatgaagcacaaatatccacaggagaaaagtctgcaggaataggttctgcaatcagccagttagtgatttgagcgcccaggataccgagtacaatcgtcaattgattcagcgaaacgagttttcccctaattgacgtaggagctacttcggcaatatacatgggagaaagtcccgaagcaattccgattccgatgccacctaaaaaacgggctgccaaaaaccaactaaatgcggaaaacgctccggtagcataagctgaagacaagaatatgaaagcagaaattatcaggagaggcttacgtccataacggtctgccatcatgcctgccaccatagcgccaatcaaacaaccgagcaaagccacgctcatggcaagtccctgcatggcgggtacatcggcaatatcgaaatagagttcatagaaaggcttcgctccccctatcaccacccagtcgtagccaaagagaagtccgcccatcgcagagactaaacatataaaatagacaaactttttattataacttttcataccattagaagattgattaattgatactgcaaagatagagcatgtcaagagcataaaaaatagaatttcattcgataaagatggacaatcttattttttgcagtttatttgatagataagatacattgttatatatttgcgcagaacagtcgaatcatatactatgagattatggtaaagttgaaagatggatttaccggagaaagagctttagtgcttccccgcattatcgttgacaaaatggaagaagaccctcttacctccatgctacacattactgacatcggatattatccgaaagccaagcatcacttccgggaacggaaagagcctatcaaccagtatgtattcatctattgcatagacggggccggatggtatcgcatcggcaatcaggaatataccgtatccgccaaccagtattttatcctccctgcgggagttccccatgcctatgcttccgacaaatcgtatccatggactatttactggatacactttaaaggtattctcgctcccttttacgctcaagaggcaagccgcccaatggatatccaacctgaatcgcattcacgcatcagtacacgaatcaatttatttgaagagatattcaatactttgaagaatggttatagtaatgagaacctgcgttatgcattctctatgtttcatttttatttgggaacattgcgatatatacaacaatttcgcaatgcaactgcaaataatgatgcagcagaagatgaaaatgtaagcgaactggctattcattatatgaaagagaatatggaaaagcatcttagcctacaagatatagccgatcagatcggatattctccttcccacttctccctgttgttcaaaaagaaaacaggccatagtcctttgacctatttcaacttattaaagatacagcaatcctgccagctactcgacactactgatatgaaaattaatcagatatgctataaaataggtatagaagatacctattatttctcccggttattcagcaaaatcatggggatgtctccacgtgagtatcgtaaatcgaaaaaaggataacaaagattgaaaaaatagcacacaactatataaataaaaagagactatgttttctacaacattgtctcttttattatttttctaaattttaaattaacctccttatctttgttccataaagaaatagacaaagcaaaattcttatttcaaaacgccataaatcaccaataatcaatttatatgaaatcccagttccggacgttcctttaaatatgttattaaatcccgccccaccgaaagcttaatcggacgggaaatcaaatcaattgacatgtggcttacatcggcatcatccgtcactttaaaatacaattccgtatttcccggatgttccttagtcagagtggcaagttcagtaaccaaagccgagttcaagaccgacagaggaatgataatcgtgatcttctgcaccagttcttctttcacatcgggaagaagctccatagaggtgattttcacttccaattcatcctgccgccattgtttggcttgacagcgagccttgatatacaagaacgttccttcattgagatatccctgataagtcacccagtcgtttccccagaatggaatctcggtagaaccggaatagtcctcaatcttggcaataccatacggatttccgttcttgctaactccacgacgaacactggtcacaattcctcccatcgttatttcacgaccaacaagtgcagctttatcttccaaatccgccatccgtgtattgcagacatgttccaatacgatagaaaattcatccaacggatgagcagaaagatagataccgaccaaatcacgctcacgattcagacgatcaagatcactccaacgttctacaccttgaggaatttcaggagttgcaacatcaataacgttttcaccaccgaacaaagaattgacagcagctgccttatctgcctgatagcggttaccataacgcatcaatgtctccaggaacacttcccctttagagtttacagcaaaatattgttcccgtttcagttccgggaaactatcaaatcctccggccaatgccagacattccatattcttcttgttgcaggcattcaggttgacacgttgcacaaagtcgaatataccgaggaaaggaccatttttacgccgttcctccattatgctttgtacagcagcttcacctacacctttgacagcaccaagtccgaaacgaatatcaccgtcatggtttacggtaaacttcaggttactttcattcacatccggtcccagcgtctgaatacccattgctttacattcgtccatcagtttcgtgatatcggtaatgttagacaaacttcggctcatgacagctgccatatattcaggagggtaatttgcttttagataggctgtttggtaagctacccacgaataacaagtagcatgtgatttattgaaagcataagacgcgaatttttcccagtctgtccaaatcttctcaagcactttcgggtcgtgtccattcttacgcccaccttcaataaatttaggtttcatgtgatccaacttgtcacgcaacttcttacccatcgctttacggagcgcatcagactcaccacgagtaaagtctgccaataaacgtgacagaagcatcacctgttcctgatagaccgtaattccatacgtatccttcaagtacttttccattacaggaatatcatactcaatcggcttgcgtccatgtttacgatcaataaaatcagggatataatccatcggtcccggacgataaagggcattcatggcaatcaaatcttcgaatgtagaaggctgcaattcgcgcaggtacttctgcataccggcagattcaaactggaatgtaccaatcgtacgtccgtcactatataatttataagtagccggatcagaaatatctatcgcatcgacatccacttcaacattacgacttaaacggatattttcaacagcttctttgatgatagacaaagttttcagaccgaggaagtccatcttaatcaacccagtatcttcaatcaccgagccttcatactgggtaacaagcatcttttcgcccgtttccttatcatcagcagtgctgacaggtacccagtcagtaatatcatcacggcaaataatcgtaccgcaagcatgtacacctgtaccacgcacgttgccttcaagcattttggcatacttgatcgtatcccgcaatagaggatcagatgacgcttccgctgcttgcaattcgggaacataagcaatggcattcggcaaattaagtttcttgtcaggaatcttgtcaggaaccagtttacacaaacgatcggattctgacaaaggtagcttttgtacacgcgcgacatccttgatagccatctttgtcgccatagtaccatacgtaataatatgagcaactttttcctgaccatatttatttgtcacccaacgaagtacctcaccacgaccgtcatcatcaaagtccacatcaatatcgggcaaggaaatacggtctggattcaagaaacgttcaaacagcaaatcatattggatagggtctatcttcgtaatacccaaacaataagccactgctgaacctgctgccgaaccacgtcccggacctaccgacacacccagttccttacgtgccgcattgataaagtcctgtacaatcaagaagtatccggggaaacccatcgttttcatgatgtacaattcgaagttcattcgttctttgacttcttccgttagaggttcaccataaattcttttagctccgtcaaaagccagttttgccaaataatctccttcaagttttatacgataaagtttatcataaccacccaagcgtttaatttttgctttcgcatcctcttcacttaataccacattaccatgttcatcttgagtaaactcgtcgaacaagtctttttctgtaaacttcgcccgatacccctcctctgttccgaaatcttcgggaatggcgaaagtcggcatgataggtgcatggtcgatcgagtagtattctaccttatcaagaatctccagtgtattgctcaatgcttcgggcacgtcggcaaagagttcgttcatctcttcgcgtgtcttcatccattcttgtttggtgtaaagcatacgggtaggatcatccaaatccttaccggtactcaaacagatcaaacggtcgtgcgcttccgcattctcttcatctacaaagtgaacatcattcgtacaaatcagtttgacattgaatttcttagcatattctatcaaatgtttgttcacattcacctgcaacggataacactcatgattggcacggggaacagtcgctttatggcgttgtaactccagatagtagtcatcgccaaacaaattcttataccattgtattgcttcctccgcttcggcaaattgcccggcagtaatccgcttcggcacctcaccaccgagacaggctgaacaaataataagtccttcgtgatatttttcgagttcgctacggtcagtacgcggacgcatataataaccgcgcgtccacgcgtgcgatactaatttaataaggttgtgataacctgtttcattcttagccaatacgatcaggtgataaccactctggtcgggcttgccttctttcaggtccatggtacggcgtgccacatacatttcacaaccgatgatcggtttgaatagtttgttttccgcttccacgatcttagctttgcaagcagcaatctccgcctctttatcctcgcactctatcgtgccggcctcaattcctgcaattcgcttcttcaggtccttgacttcacctttcggaccgctgttcttcttattgacgtagttcgtaaattccttgataccgaacatatttccatgatcggtcacggctatacccttcatcccattcttcatggctttatcaaccagacgagctacgctagcctgaccatccaacaaagaatattgagtatggacatgtaaatgaacgaaatcctgcataatgataagtagttaatttgaaggcataaaattactacctcccgggttataaacaaaaataatcctcaaaaagttatcaacattcgcatttctatgctcatttacttgctgaatttttaaattaagtatatttttgcagacaatatcattaaacagcattcatgggccgactaaagaaattgaagaaaatacgtattcaccgcgaaggaacacatatattatgggctagcttcttgctattgctattgattaatgcggctctttattgggggatcgattgcaaaataccattttatgtggtagcagtagcgagtatagcagtctatctgctgatggtgaatttctttcgatgtccgatccgtctcttcggacaggacactgaaaagattgtcgtagcacccgccgatggaaaaatcgtcgttatcgaggaagtcgatgaaaacgaatatttccatgaccgccggttaatgatatccatcttcatgagcattgtgaatgtacatgccaactggtatccggtggacggtaccattaaaaaggtagcacatcataatggaaacttcatgaaagcatggctgccgaaagccagcacagaaaacgaacgttctacggtagtaatcgaaactccggaaggagtggaagtactcacccggcaaattgccggagcagtggcacgccgtattgtcacctacgctgaagtaggagaagaatgttatattgacgaacacatgggatttatcaaattcggttcccgtgtggatgtgtatttacccattggcacagaagtatgtgtcagcatgggacaattaacgaccggtaaccaaacggttatcgccaaacttaaataattctgtcacaatgacaaacgttattaaaaacagtattccgaataccgtaacctgcctgaaccttttctccggttgtattgcctgcgtcatggcttttgaagccaaatatgagctggcactacttttcattgctttaagttccattttcgatttcttcgacggattgttggctcgtatgctcaacgcacattccattatcggaaaagacttggactcattggcagatgatgtcagttttggagttgctccttcactgatcgtattctctctgttcaaagaaatgtattatccggcaagtatggagttcatcgctccttacctaccttatttggcattcttgatttctgttttttcagcattgcgcctggctaaattcaataatgacacgcgacagaccagttcttttgtgggacttccggttcccgccaacgctctgttctggggttctttagtggcgggtgcacatgacttcctgatatcagacaactgccatcctgtctaccttcttatacttgtctgtctgttttccggactgctggtatcagaaataccgatgttttcgctgaaatttaaaaatctgtcatggaatgacaacaaaatcagttttatattcctgattatctgcattcctcttcttatatttcttggaatcagtagctttgccgccatcattgtatggtatattttactttcactttttacaagaaaaagtaaataaacaatctcttggcacgtttgttgtactatgagttttatcgaagtaacaacataaaaatcatagcccgatgcatatacttttattcatactcatttttattattgccattttcgtatttggcctttctattatcggcttcatactaagaacgattttcggattaggacgtggttcttcttcatcacgcccgaaacaaacggaatcgggacgtacaagccaacaggactatggccaaagagatcgccgttcaaatgatgatgaagaggaaatatattccgagaatgttccggagaaaagacataaaaaaatattcacccaggacgatggtgaatatgtagattttgaggaaatcaaataaaacaggatactgcttttattttcgtttcgcagcaaagaactctttcattaatgtagcgcattcgtcagccattaccccttttacaaccaccgttttaggatgtagagccgaaccggcatatttctgatagccgcgtttttcatcttcagcgccaaatacaagtttaccagtctgtgcccaagcaatagctccggcacacattacgcaaggttcaaccgtgacatacagggtacattcgttcaagtacttgccaccaagcacattggcagcagctgtaatagcctgcatctcggcatgagccgttacatcattcaatgtttctgtgagattatgggcacgtgcgataatccgctccttacaaaccacgacagctccaacgggaacttccccccgctcggcagcctttcctgcctctatcaaagcttgtttcatgaagtaaatatcgtccagcattccaccctttaattttgaatctattatttttattatccccctatcgtctcatgtcgtgttcaccaaaaagggttggataatcttcttccatattcttatgaataaacatgagaatcgtttcacgaagccaacgtgacttgttcgttatcttatatttctcaagataacgatctacaatcagctgttcttcgtcgctcaataaaatgctcatccgtcgttcccttttggtacactcgacatgcattttcaggcacttcttactcctttttctcatatcttctgcaaaattacttttacttctgtaaatacaaagaataaaagcagtaaatttgcaaaaaaagatggctaaacataatgatttaggaaaagccggagaaaatgccgccgtagcttatcttgaacagaaggggtatctcatccgtaaccggaactggagaaaaggacatttcgaactggacattgtagcagcaaaggataatgaactgattgtaatagaagtgaaaacccgcagtaatactctgtttgcagagccggaagatgctgttgatttacctaaaataagacgtacggtacgcgcagcggatacctatatcagattgtttcagattgactctcctgtacgctttgatatcattacgatagtaggcgatgagataaatttcaaggttgaacacatagaggaagcattttatcctcctttatattaaagttcactacagaagatgcagaatacatagagttattatataatcgaatcattatgaatgtagaaactgtcagagaatactgcctcaacaagaaaggagttaccgagtctttccctttcgatgatgtatcacttgttgtcaaggtgatgaacaaaatgtttgctctcatcgatttggaagaagccaatcacatcgcattgaaatgtgatccggaaaaagcgatcgaactacgcgaacattattcaggaattgaaggagcttatcattttaataaaaaatactggaacagtgttcgttttgagagtgacgtagacgataaactgatgaaagaacttatcgatcactcttatgatgaggtaatcaagaaatttactaaaaagttacgcgcagaatatgatgccctcccctgatatattcccggttccattgattcatatcagcgagactaattctaccaacaactatctgcagtctctctgttctaaacaaaaagtggaagaactcactgtcgtagtcgccgactttcagacttccggtcgtggacaacgcggcaactcttgggaatcagattccggtaagaatcttcttttcagcatcgtcatcttccctgaattcctggaagcacgacgccagtttctcatttcacagattatttctttggctattaaggaagaactggatacctataccaccgatatctctatcaaatggccgaacgatatttattggaaagaaaagaaaatatgtggaatgttgatagaaaacgatctgatgggacggaacatcagtcaaagtatagcagggattggaatcaatattaatcaggaaacgtttcacagttttgcccctaatcctgtttcactgcgacaaattacaggaaaagagttcgatctatttgaaatactgaagagcatcgtattgcgtatccaatcttattatagtttacttaaaaaaggcaatacggaatcaatagtctgccaatatgaaatgtctcttttcaaaaaggaaggaatgcatcgttttaaagatgccaacggtgaatttcttgcacgaatcatttgtgtagaacccgaaggaagattaatactggaagatgaaatactaaacaaaagaggctatatgtttaaggaggtggaatatttactgaaataatcatcacttaacaaactattattgctacattgtgttgaaaaaataaatatatttgtaaattagcaaccttataaaaaatgagaaaaatgacgaaagctcaattcggcctacatatatggataggaatattcctttgtttatttagcgtgtcttgttcagatgatgatacagattcgataaaaggagacgatgatgatacggatcttagcataaatcattggatagagaaaaaattgcgtaacgattatttatggtataatgagttaccagcaactaacaaaatagattacacagccgaccctgaaactttcttttattcattgctcagtctgaacgatggcaaaacaaggaatggaaaacacctctactactattcttacatggagaagaataaagattataaaacacgtaccagtattgatgcagacaagacctatggaatggaatttacattgtttaatatagtagatggaaataacaaacctttaggatattattatgcccgagtagtgtatattctacccaatagccctgcacatgcagccggtttggaacgaggagattggattataggtatagatggaaaaaataatataaaagaaggaaattacaaggccctattgaatggttctgcttctcaatggattataaaacacaattcagaaactaagacaattgccataggagcttctacggcagtcgaagataatccgttatattatcatgacgtacttacgtttggagataagaaaataggctatctggtttacaaccatttcactccggggccaacgggcgtagatgatcgtacttatgatgaagaaatgaaaaccatatttgccgatttccaatcaaaaggagtgaacgaatttgtattagatttgcgctataacgggggcggttatgaacattcggccaatatgctagcaggacttttgatttccgaagagtacaaagataaagtctttggtattttttccaacaacaaagggaaagtgacacacaccagatatttcaatacggaaactggaggaacgacaggctatttgaagcttaattctaatcgcatttatatcttaacaagtgaaaataccgcatcatcctcagaattggttatcagcagtttggaacccttcatgaatatcatactcatcggtgaattaacagaagggaaaaatgtcggaatgcagaagtattcagatgatcaatatgaatgggcgtattggcctattactacaaaagttaccaatgctgtacattcagactatagtgccggatttacccccgattacgattggaacgagtttaatttagcccaaaatccagaagacactttgctccctttaggcagctctgatgagtttatgttaaacaaggccattactctgataacgggaaccaatcggaatacaagaaacataacaatgtcgtctcaaacaatacaaagaagccaacctatatatcaatcgatagatcgccatactactggtggagtgctactttgtccgattgagatggaataaaaataccttgagaatagaaaaagaggtgaaccacctagcgattcacctctttttctattctcaatatcttatccaatgtcttttgagcttctgtcgatggaaaacgtagaacaactttctgtaaagagttacgcgctttctcataccgggtagtaaacaacttcgataatccatcccgatagcgggcatactgcattttagtgggagaaggaagttttttgtaatccgtttctaactttttcttctcctgctctgccatcaaataataatagtttcctaaaaagatattagcagccagattatccgcatcgagttgcaatattttttcgtacatacgcaaagcatctttttcttgtccgcggcacacttgcatttccgcacatgtttccaaacaatctacattatttgggtccttttgcagcaactctttgtagaacaaataagctttgtcgtaattccgtttctttttataggcgagagctaattcagtagccagtttggagctaatttcactattcttgtccacattcgtccaataatacatttccgtacggtctatattcagaggaatagtctgtcggaaatagctcacagcctgtccattctgcccagcctcaatggcggcagatactttctgcaacatctcatcaaccgactgtgcattcagcgccagcggcagtgagaataaagagataagaaaaatagttaaggtcctcataatccatctgattgctatttagttcgtgattcacaaagatacaacaaaaaaaataaaaaatgtacctttgtggacgaaaagaacaatcaatttgataaaagtgtttctataaaatgatagataaaaaacaatcctccgaaaacagacgaatattacggatagccataccatcgattatatcaaatattaccgtcccgctactgggacttatcgatgttaccatcgtaggacacctcggttctccggcctacattggagccatcgctgtagggggaatgttgtttaatattatctattggattttcggattcctacgcatggggacgagtggcatgacctcacaagcgtatgggcagcatgatctaaatgaaatcacccggttactgttacgttccgttggcgtaggattgtttatagctctttgcctgttgatactccaataccccatcctgaaattggcattcactctgatacaaaccacaccggaagtcgagcaactggcaactacttatttctatatctgtatctggggagctcccgccacattaggactttatggattcgccggttggtttatcggaatgcagaattcacgctttcccatgtatatcgctattactcaaaacattgtcaatattgtagccagcctatcctttgtctacttgctggatatgaaagtggcaggagtggcaacaggaactttaatagcccaatatgcaggtttcttcatggccatattgctatatatgcgctattatagtgcactaagaaagcggatcgtatggaaagaaattatacagaaacaagccatgtaccgtttcttccaagtcaaccgggacatcttcttccgtaccctttgcctggttgtagtcaccatgtttttcacctctgcaggagccgcccaaggagaaattgtattagccgtaaacaccttgctcatgcaactattcactctgttttcttacatcatggacggatttgcttatgccggtgaagcactggccggccgttacataggtgccaagaatcaaacagccttacgcaacactgtacatcaccttttctattggggattgggtctttcattgatattcaccatcctttatgcaatcggtggaaaagaatttcttggcctactaaccaatgacacttcagtaatcaacgcttcagacacttatttttactgggcacttatcattccactagctggcttttccgctttcctgtgggatggagtatttattggtgccaccgctacccgtcagatgctttactccatgttagtcgcttccgccagcttcttcggagtatattacgctttccatcctctcctgggaaatcacgccctgtggctggcttttctcatttatctttccctgcgaggggttgtacaaacctttttgggaaggcaaataataaaaaaagtaatcgcatcccagtgaggctatccgataaattatctctatatttgcggcaaacaataaaaagcaaaaggtatggcaaagtataaaagaatcttactaaagctcagtggagagagcttgatgggcgaaaagcaatacggcattgacgaaaaaagactggcagaatatgctcaacaaatcaaagaaatccacgaacaaggggcacagattggtatcgtcatcggaggaggtaatatattccgcggattaagcggagccaataaaggttttgaccgtgtgaaaggtgaccaaatgggaatgttggctaccgttatcaatagcctcgctctaagttctgctcttgtggctaccggtgtaaaagcacgtgtattgacagcagtacggatggaacctatcggtgaattctacagtaaatggaaagccatcgaatgtatggaaaacggtgaagtggtcatcatgtctgcaggaacaggaaatcctttctttactacagataccggttcttcacttagaggaatagaaatcgaagcagacgttatgctgaaaggtactcgcgtagatggcatttacacagctgatcctgaaaaagatcctaccgcaaccaaattcgatgatattacgtatgatgaagtgttgaaacgtggtctgaaagttatggatttaactgcgacttgtatgtgcaaagaaaataacctgcctatcgtcgtatttgatatggacacagtaggtaacttaaagaaagtaatcagcggagaagagataggtacgttagtacacaactaatcagaaaataaaaagtgtgaatttcgctgtatagctttgataaaaactactattgcaaaattcgcactttgcctttcttttcaaatattatatcgaaacgaatacctatttatcaaaatactggatcaaatcatacgcattaaaattcaattcgcgggcaaagaaagataaataaggaaacaactgataagagttatcataaagacccttattggcaggtttcgacgaattatccgtaccatcatcatcctgatatttaaaccaatgccatccgatacaattcttagcctcaagcaatcctaatgtaaaatgctgataagcataagccctctcattttgtgtaggaacagaatacccggctcccgactggttattcagatcggaatcctccacccctttcgtataaaactcacttacaagaaacggcttatccgcccaacttgcccagtctgcaatcgctgttgtcagttcgggactccaacggctataatagttgatagaaatgacatcacaatattttccggcagctctcatcactccctccatatatttaggagttccatgcaatcgagtccccagataaagcagcttatcatctactttcatcactgcctctttcactgctttataatatttctctgctacgatacctgcaaactcattattcaaggcatccgtcacactttgcacgcccttggaatccataaagccttttgccgcaacataagccggatcattcgaactgttgatagccaagaaacgatccaaaatccgggaactgtttgaagagaagtttatctcattatccgaaaagaaccccaagacattaggatcacgcaaataatctgcgaaagcactacctgccaaatatgaatcacaccattcggcccatccattataaaacacaagacctgcagcattatcatcgcttcctccgggataattataagacttctcactcttgaactggcttagaaaagcaaatgaaggcgccaaagtcaacggactgcccggattagaagcattatgaatctgaatcagtgaataagtacctgtacaaaaggcacctgtaccatgaaagccaatctcgctcaattcacgttgagtagtagacagccatttctcatcagttccaaacctactattccaagccgctttattacgactggaagtccccttacgcaaagaagtcgcactgcgttccagatgtaaacaaccttccggatcaaccaaccaccaacgtccatctatcttcttcgtataaaacctgcccgtagctgcttgtttcggaagcgttgtcgaacttccatatttattcaccgactcctgatacgctttcaatgtcttaatagccggtttatatccatccatataagcaataatacgtgtattccccgttgtccaactggatatgggaggataagcactggaatacttgacactgatagggcgatacatattggcatttaatgacggagcatataccacagaggctccaggaacgggtaaatcttccgggtattccgactccacatctcccccacccatcactatatcaggaggcataaaattagggtccttatcatcatcatccgtacaagaaaccataggaatagaagttataaacagtaaagctcccagtataaatatttttttcatggtatgtattttattgattgttatttgattgttgatcgaaccagtcggctaaacgataggcattgatattcaattctttcatagcatcggccaacggtttataaagattgtattcattatctatcagtcccttgttagagtccaggttcgaaggatctgccccttttgctgtcggatcattatcctgataacgaaaccagtgccatccgacacaatttccactttccaataatcctaaaacaaaatgctgataggcatatccacgctcctgttgagtttgaacggtaaaacctgctcctgtcgtattcgccagtccggaatccattcctttcgtataaaattccgtaatgatgaaaggcttttgagcccattctccccaatgtttcatggtcttttcactcggcgtccacgctccatagtagttaattgcaacaacatcacaatacctgcctgccgcttccacaatctggcggataaacttcggttttccatgtaaacgactgcctagatagagatgattgggatcatacttccgaatcgcttccgatactactttataatatcgttcagctaccacccctgcaaactcctcccggtgctcatcggttatttgctgcaaagtaattccctgctttttcaaccaggattccgcatacactcttcccggatcaccagggttctgtaaagtcagataaccttccagattcttgggtccgaacggaagttcattatccgaaaaataaccaatgatgtttttatccattttattcgcaaccagtttttgtgccatctcatcgcaataagtctcgaattccgggtcaaaaacgaaaatacactgattaggatatcccgtgttaccaggcaactgataagttcctccccgtttcttaccatatccgctcatcaagttgagaatgattgagcgggtcaagacctccttgtgggatgcattgtaagaagcaatcgcctcttcgttactccaagagcccgtaccggaaaagcccagtgaatgaatcatctgtgctgttctttcgatccatttttcttccgtaccaaatttgtccagcatcgcttgtttattgcgttcggaagtccccaaacgtactccaaccaccactttctgcaaatgccgatatccgtcgggatcaatcatccaccaacgatttccaatacgttctactctaaaaaatccagtagcccggtgtttcggagcatcccaatcacttccatactcatttacatgcactttatcagtagctttaaaaccatccaattgagcaatggtacgggtatcatactccttccatggaagatctttctgtcctttcacccacggacgggcagtgaccttaaatgtacgtccctgcccataacccaactgggataacagcagtaaaaacaatataactatactatttttcatcttctaatattcttttacgattcgtattgcatttaaaataggcacagactctaccgctccaaaacgaacgacaagcccttttccctgtgaaaccggaacaatatactttttaatgaccgcacgttcggaaccgtattcttctgcaatattcatttgcccggcaacagataccccatttatatccacagaaaatacccggtttgcatactcctctttcaccacatcatttcctaaattatacaccaaagcctctctcttattttcagaagtaagttccgtccaatacaaatatacagcatagacaccatccggcacatccgctttaaaggcctcaatacctacccgttgcgtctgaaagataggatcctgatccgttcccagtatatcagtgtcgctggcaggcaaagaaccgtaacgagtcttgttcggagccacttctccgccaatatatccccatgagcctttttcataagcctgttccggtatccaacacagttctgctgtccgatcctcgaaataacgttgagcacccagtaatacattgacttccgtaaagccgttcttcacattgacacattggaaattgcaaacatactggtcacgatattcgcgtccctctttttcaattacagcatctaccacattttctccgttgataaaaggaatatccacagaaacgaccttatccgataccggatatactcccaaactctttccatttaaaaagacttccaccttatctgcattggtatacaccttcaaaggttgcgtacagctctttccatcccgactggctcctgccctgttcttccacgatttagaagcaatgtgcaggacaggtgcctctttcagataagcctgataaagataatatccatctttacgttctctatccatacttaccaaccctttattgttcacatgaggcatagcgtttcttctggcttcggaataaaaatcattcaagttccaaaccatagctcccacgatataatccctctttagaatttcaggcaagtaatgttcgtggtagatggaaccaaattcacaactaaaatcaaaccgcatcggcgaaaaagagtgaatacgagtatccacatccgccccatattcggtaatgagcaacggtttgtgaggaaactccctgtgaagttcttccagtttctcttcaaatccactcaagctaccaccataccatccattataaagattaaaacccaatagcatcggtaattctgcaattcctgcttcctgatagatttgagaagtagaatgacaaggcaacatggtatagcgttccgaatccagacttctgatctgcgcctcaatcgccgaagctatttgatgaaggaatgtcatgtagtccgcccgttccgtcctattttccggattaaaaggaggacgcaaaagcacttcattcatataagcccaaataataacagatggataattatagttctgacaaaccatctctgtcacctgttccacgcaattatccataaatgccttactttgagtgatggcattcactactggaatttcaaccgaagtcaatagtcctaacttatcacacatctgcatcacaaccggatcttgcggataatgagccactcgcaggaaattacttcccatatccttactcaactgtacatcccggatatgcatttcatcccgcaaagcatttcccattcctttgtaatcctgatgccgactggtaccaatcaatttccgatatttcccattcaagaaaaaacctttctccgcatcaaaacgatattcacgaattcccagcggattgacaacacaatcgagcacctcctcttttttattcttcagacggctatataccttatacatataaggagagtctacatcccaacgtttaggctgcgtaatagccatgagcgattcaaaagctacattcttttcttctgccttcacatttactttcttttgtgaaagtgctactctattaccatctgcatccaaaatctccgtttcaagaatcaatgattgattactcttcaaagcattagacaagaatgtctttactgaaatatctgcttgcaaatccgtaatcttcgatgctttgagatacaccccactagaagcgtaatgagtagtagacagttgcacaggagaagtatacaccagataaacatcccgatagattcccccgaagaaagtaaagtccgctgaaagaggagcaatatccggattatgcgagttgtcaacgctcacagctatcagattgcgtccggcatgaacataatcagtcacgtcaaacgtaaaagcggaataaccacctttatgatttccaacaaacgttccattcacaaacacattcgtttcctgattggctccctcaaaactaagatagactctttgttcggggatcagttcctccacagccaccactttcctgtaccagccttttccccggaaataaccgggaatttcatcatctgcatcttttgcattccacgtatgaggaatggaaacgtcagtccaaccggaaatatcaaagtcagcagtagaggcatctccctcaaagagggagaacttccaaccgtcattaatcgtttgcgtcacacgctgactataaaccgtgccggtcataaccagtaacaaacaggctaaaattatttttggatataccttatacatacttaataccattatttcgagattgaacggactgcacgaacaaatcttttaccgtcttttttagcattcgatttatcccaggcaagcggttttccaaaacgtacataaaatgcgcttgtaccgctcgatgtttcacgactagcccaataggaatctccggtagcagatgctgctgccgtattcatgatagttcctcccgcaccagtaatcacttgatcccaagctgtacggtttgctttctcaaaatcggtaatcgcatccgggttattctccgttgcatctgccactgcagtcccattataagtttcaaacatctgttccaaatccgttctcgtaggccaataccatccggaacctttatccatacaatatttaagagcgggcatttctgctgcattcggcaatgctgccaacgcagtagtatttgccaggccattgtcattggataaagttaaaccggtagaagccggagagcttgccgtagaccatgccagattctctctgtccaacgacataatcttagccttaccacgattagtgccatctacccagaacacaatgcctccttttaacgaaccattatccgcaatcacctgtcccaccgcaaactcggaacttaaaagccctctttgtgtaatagtaacttcttgtttaggtgcattcgctccgcttccggctattaccgtagcagtcgttacccggttagaactattcaaattaggcgataatgtccagaaataaagagttttacttgttatatcaacatacgctttcacccaagactcatcagttatatttactgtaaattctgtttcatcagaaatcatcgttattccttctgatttcgtcacagcatcaggagtaatagtcacggcatttgtgcttaattcgagagaagcgcctccttcagccgcaacattctgattcaccgttacctccaccgacttagcggctgtgccagtaccggctgtaaccgtagcaacagtcgtacgaacatcgccagtggtatttttagattttgccttgaacgtaactgttgtgcccgaaatagtatacgaaagccaggaatcatttgccaaagccacactaaataccgttttattggatgtcaatgtcacatttgcttccgcttcattagctccttccaatgtcacaggatttggattaaccgtcaatgttgccggttcttcaggataagtataatcaccgattgtacgcatacatcttacaaaacggttggtagctgttttatttcctgcatcagctcccgatttaccgaaacgtacccaataagcttgattacctgctgcgttttccgtactcgaccaatagctttcgccattgcccgaaccggcagcttcgttcatcacatcaccttgtaaatcagtcaacatcttatcaaatgcagcacgtgccgccttctctacttccgtcagtttatcaggtacggctgaaacaaaatccggatcagcatgtccaacaccattataggcatcaaacaattcccataattcatcgcgggcaggcagataccacccgtcacccaatgactggcaatatgctaccgcatcatttgccgacggagaagtgaacaaggcagaattagcatatccgttgacagtggaaaatgcactatgaggcatcacagaagcctcaaaaggattccctccctgacgtttcactgaaaccgcttttcctaccatattatccgaaggatccacccagaaaatcataccgataccctcatccacactttgtcctatcttcaaagaaagatccggttctttagaatcctgggtaaccgtcacttctactgtatatgagccgcaagtcagtttcacgacagccgttcttgcatcttcaccatcattttgtgtcaaggccgtgtagacaacactttttgaacttacatctacagaaagccattctgcttcgtactgtgcaacaacctgaccgacattggtatataacagcgacgtaacagaagaacccgccgctttcgccaaatttacttttgtatctttacaattaaattcaggcatcacgcgtaccgatgcatcatcgacacaggaaagtaaccccagatttaaaatcaataagaagtatattatttttttcatattcattcatgttttacagataatcaatcgcttaataccagttctcattctgtgggaaattctctttccccatcaagtcaatctgttcctgtggaataggccaacattcgtgctttccaaccacaaaactggtacggcattccgcataatctttatccagataagggttttcagccttcgtctcgccataatgcgctttcactctttcgcccaagagtcccaaacgtttcaacaaaggccagcgaacgccttcaaaattcaactcacgggcatattcatccaaaagtatatcctgtgtcagaggacctgcaaatttatcatttcccgcacgttcccatgttttattgtaacagcgcaaagcatctgtactcatacctccgtcacgacgcatatatgcctctgccgccattaagtaagtttctgccagtcgatagacaatcagatccttgaaacccgttgtccggtccggattatcagccatcgtccattggtcaaagtattttttcgacataaaatgcagtgtttcacaatagctggaactctgtgtaagaggaatcaattctccatatttaggagaagtagggtcattgtatttgaaacggtgaacaaacaactcattatatcgcgtatcttttgcttgatcgtacagactcaacagataggtattcggataaatacgtccccaaccatatccaccctgatcggccgtattgatacaacctgaaattttattgattcgggtagtggtttgaatagagacacgatgtccggcaaccggagttccggaaccacctccacccaagttttgtgaatattggaaactccataacacttccggagatttcaaatctgccccattaaatacattctcggctttcttttccatcgagtagatgccttcctgcttaaagatatcctcacattcctcaatggctgtatcccaatctgactcccacatggcaacctgtgcacgaacatgcttggcagtagcttttgttacccgtccatacaatacatttccattattttgaggaagcgaccagtccagccctttcatggcatcgtccaagtcagttgtaatcagcgtcatcagttcttcgtgagaagcaggtttgtattcccgtttcagattgtcgacggtggtcggggtgatattcagataaagacggtcaaagcgtttccagagttcaaaatagctccgtcctctgaagaatttcgcttcactccatgcatggagcacatcgctgtcatccagtcccagggcttctgcggctacaataatttcatttgcttttccaataataccatagtgatgtttccagaacttattgacatccccagtacttggagtaaaactcgtgttcaaacgtccgattgaagtagaaacacctgctctaagtatcgcaatatccgtattaaagtcacacatagtaacgatgtacagattggattcattattatccgctccacccggcaattcacgagctagggagtacagacctgtaacagctgtattcaacccttcgggagtagtgaacagataattgttcgtcacgtctgtctttgattccagatttaataaatccgagcaggaagcggtcaacattccgcagatgacaaaggctgtatatattaactttttcataaggattctttattttagaatgaaacattgacaccaaatacatattgtctggactccggataagacccgggagtcagttcgggactataagacttaaattccgtaaatgtcagcaagttagtagcagttgcatacagacgtaatttatgaatcggagtattcttcaatagtctggccgggaaagtatatcccaattgtaaggtgcgtaaacggatataagatgcatcctgaatagcgatggcactcaaataagcagggtctgcgctataagaaggacgcgggaattcgttcgacggattgaacggagtccaataatccaccttcactccattcagttttccacgcaaagaacctccggaattatagtcatacaaataactattctttatctttctgccggaaactccataccaatccatgaacaagtcaaatcctttccagttccatgtggaagaaagagagacggtaaatttcggatctttccggataggcactctgtcatctgccgtgatctttccgtctccattgttatcacgtaccttaaccatacccggttcaatagcgccgccgtaatcaatcgggctgtcggctataccgtcattgttactgtcataggtgtttttcagcgtatataccagattacctgtaccatcacgagtaatatcaaaatcatcatactgaaaaattccgtctaccagataatcataatatacattgatcggttctccgataatccatccctgtgctacctgactggcgggtttaccattttcatcgagcgtatcgtcaatacggacaatttcattcttatacatactgaaattagttccaagcgaccaggcaaactctttcgtacgtatcacatcaccatttaaagaaagatcgataccactggattttgtctttcccagattatccagcatagtggtatatccaagtgatgcattcaaagagcgttccaccaataaatctttcgtatgcgtattgtaatattccaccgtaccattcaggcgaccattgaagaaactaaaatcaacacctaaattagccgttgcagactgttcccatttcaggttcgggttagaaagctccttacccggcaaatatcccatctggaaagtatctccaaactcatatcctttattatctgccagccccaaagtagtgtaattgccgataccgttctgattaccaacaataccataactgacacgtagtttcaggttatcaatccacgacacatctttcaggaaattctcctgattgacacgccaggcaaaagcagctgacgggaatgtaccccatttattttcttttccgaaacggctggaaccgtcgcgacgaacagccacattcaacagataacggtctaaaagcgaatactgtgcacgagccatgaacgacaccagattattttcattaaactgacgacggggcttgcctgtaaactcaccttgagaaatgaaattccaatctttatctaccggaagattctctactgaatagccgatagacttcgagccattatggtcgacagactgcacaccggtcaacgtcaactgatgtttcttattgcggataggcactttataagtcacaatattctcaaccagccagttctgcgtgcgtgattcgtcgagcacagctgttcctccgcctcccggatattgggaatctttataggaaccgtcttcagatgtctgattataaacggaagtattcagacgataattgaatcccttgaaaggcttcacatccataaaaaagttcaggcggtaattatcacgagaaacttcacgtccgtaatgttgagcacggtacaaaggattataatttccttccgagttgatatactttgtatatttaccatccacatcatatatttccgccaatggggaactggtaataaaatcattaaagttaccatcctcacgatcctgtttagtcatcgcataagaagaattgatgccaaaactaatccactttgatatttcaaagtccagattcaaccttaaagaaaacttctggtatcccgatccggtaaccaccattccctgttggtcaaaatagttggcacctgccgatactttgattttctctgttcctccacgtacactgacatcatgattatggtaaattgcatttctgaacatttctttttcccagtcgataaactttccgctggcccatacccgctgcataacctcgtcttccaatgcctcggctatcgaaatctcacgtgcatcaacaattcccttatcatgtgccttcgcttcacggcgaagctgcatatattcttcgggagaatagaaatcaaaattcctccagagagactggatacccagataaccattataactgacttccacctttccggctttaccgcgcttggtagttaccaataccacaccgtcactggcacgtgccccataaatagcctgcgacgcagcatccttcagaatttcaaccgactcaatatcgtccgcactcaacgtgctaaactccgttgcactggaaggagaaccatctatgatatataaaggagcattgtccgcactgatagaacgggaaccgcgaatggtaatcgaaggagtcgatcccggacgtccggaactactcgttacattcacacctgcggcacgtccacgcagcatatcagccacattgccggcaggaaaggttttcatttcatccgctttgaccgaggctaccgaagttgccacgtcacttttacgctgaacgccatagccgacaacgactaattcatcgagcattttcgactcttctaccatatccacattcagtaccgttttcgtaccgacacgtatcttctgttccttatatcctatacaagagaaaacaagggtagattttgcagatacactgattgaatattttccatttacatccgtcactgtaccgttagtagtcccctcctccataatattagctccggggattggtccaagtgcgtctgtcacaactccagaaactctgacgttttgagcactaacctctaaagagataagaaaggctgtcaggaacacagcccatttaattacgatgtttttcatactatgtaataatttgaatgattacagcgcaaaaatccaaataattagtgatttcgaataatagaatcgtccgtataaaagttcaaatagtacaattctcaccaggagacaaatacataagacgctatatattaagcgtttgtgtatttcctccggtaagcagccggagtaatatcataagcattcttaaaacatcggataaaataacttggattagaaaaaccgtaatcaaatgctatatcagcaatcagggcattgggatcattgattaatttttctgttgcctttttcagtctcaaagataaaataaagtcattcggggtctgtccggtcaatgctttcagtttggtgaaaagcaaagttctgctcatgcacatctcacgtgcaaaagtggctacgtcaaagtctgcgttatcaatataagattccacaatcgccgtagcatccatcagcatctttttatcgatcggattaaacggaaggtcttccactttaggttcatcattccgggcaaaccgctgctggagcagtttacgagtctggatgatattgttgcaacgggccaccaatatcttgatattgaaaggtttggagatataatcatccgctcccgtctgcaagccctctaaggtatgttcttcccggttgcgggcagtcagcaataccacaggaatatggctggtctgcaaattgcttttcaacttctcgcacatctccaggccggacataacgggcatcataatatcactcacaatcatctgtggttgtagtgaagaagcctgctccaatccttcctgcccgtcggcagccgtatatacatcatatatttgttcaaaaatctgtgccaacaccttacgcatctccgggttatcctccacaatcagtattttcaccgttttatccggcttcaccatttccgagatttcttgaggctctattacataatgtccggcaacgcgttcatctgcagaggaagatgcttccacattcacatttgcatcccggtgaagagtaacgataaaagacgttattccattcggctcactttccactccgatagttccctgatgcaattccacaattcctttcgccattgccaacccgatacccgatcctttgactgtctgtgtagttgttgccgagtcatcctgccaaaaccgttcaaatacatgtttgatcttggacttttcgataccgacacctagattattgactgaaatcacaatgtcattctctccttccgctaccaattctacagaaatccagtcaccgggcttcgtatatttaaaagcattggacaatagattatagaatactttctctatctgcgtcttgtcaatatacaaatccgcttctttcaaagtggaagaaaagcggagatcgatcttattcagctgcgcataactatagaaagaacaacaaatctcctctatcaccgcaacaatattctctttggaaattttcaatttcagatatccctgatcctgcttacggatatcaatcacttcatccaccagattattcatccggcgggagttcttataaatctccaaaattttattatacacctcggggatcatgtctttatgcatcaggagcatctcaagctgactggatataagcgttaacggagtacggaactcatgcgatacattggtaaagaaacgtagtttggactgattcacattttcgatatactctttttcccgtttctcggccaatagagaatgttgcaaggttttccgtatccagaacatacggataatataacctgcaataaggatacctgccaatatcatcagcaaaataaaccatgctcgttgataaacgggagcctccactatcagctcaaaactggcagaaggtgcttcctggtcgtgaatgcgcaactggtcgccacgaacatgaaaagtataacgccccggatgaagattggtataagtaaccatcgtattatctcccgccttcatatattcgttatcaaatccttcaagtttatattccagaccgatattggaaatattattcagggtattgctcgctatctcaaaagtgacggaagaatacctgggcggcaatactaattgatgttcatacaataccgtttccttgataagtcccaacgaatcaagtggttgtatttccgtattatccacaagcactcgttttacgaacacattataatccacagactgcttgttcagtttctcctgggctatggaaacgatacctgccagtccacagacataaatatcgtggtcggacgtaatgtacagccctccgtcattcacgttattcaagggaaaatcactctgcctgttatagttctcgaatgtagtagtggctagattgaatttagagaaaccgccattcgttgccacataaatggaaccgtccagcggactctctaccaatccggtgataaatccattctccaatccctgcttcgctccgtatccaacaaaggtgtctttcttcttatcgaatagataaattcccgatcccgtcgatcccagccatatacgtccttttctatcacatagaatatgattaatgtggtgctgtgccgtgctctgcgctatttgggagaaaggataactacgggaagtacccgctttcaaattgacccgtatcaaatcaaaagaagtggtcagccataaatccccttctttatcaaacgtcatatcccaaacctgcgacaaatgtctggaagctaaagaaggatgttcgaaatgatgtaaccggagatgttttttatccaatacaagcagcccacccttggctgctatcaataaggaatcatgaccggcaaactctatcatttttaccagattataggccctgtcgactgtttttccttccggagtatcgatattttccgtaatagattctatatgtccggtcgacaggttaatccgattgatgccctgataaagcgaagctacccaaagataatccggttctttctcataatacaaagacttcacaatcttaaaagacagctcttgagcatataaatgtttaagcggaaaaaagcgtttggcatatttatcatagtagttcaatccacttccttcacttgcaaaccagatccgcccggaacagtcttcggcaatggaactgatgatataggaattcaaatgcccgccaacagccgtagacgaacggtaaaagtgataagcatcattcgctacattataatattgtattccctgatagaaagtgcccagccataaagttcccgaagtgtcgtaatgcatcgaaatgatggaacgtatatcggctgcctccacattcaagtcatattcataatccgtaaactctccggtagagagatttaaagtctgcaaaccggcgtaagttccgatatacagaagactatcattggcttgtgtcacatgacgcacattatcatggttgattgtattatcagccactttattatatctgtaatgagtaagctccccatttgcctccaaccgggtaagtccccgatttctggtagctatccagatgctcccgtctctgtcttccgtaatcgaattaacagcccccacatcaatatgacgggtgatatgagcagcctgatcgatacagtaaatacccttggaagaagtacccaccaccacggtttgattctgacgaaccattagactgttcatcaatatatcctctccgtccgaagggaatgaaaagaataactcgggcacttggttgagatcacgataacggtagatttcttttccggtagctatccacaatgcgtcgtgcgcatagcagattcctgcaacttctccttcacgcaacaccttaaagcggttcaaacgcatgtcataaagagtcacactctgcaaactacggataaaaagcaatccttccttgtttccgcaaacctgccggatattatttatattgattgaatagggattggcgttatccggtttgaagacttcaaatttacgaccgtcaaagcggttcagtccgtcttgagtaccaatccataaaaatccgaattcatcctgatagaaacaattgaccgtttgatgcgaaagtccttgcctcacgtctttaaaacgcatattgatatcctttgtcacatttgccatgcaacaaagtcccgatataaacaggcaataaataacaagaaagttagctttggtcatctgtgtttttcgataattcggatacaatattcgggaaaatccaagatatatgcaagtgtttatgcaaaaacctgattgactattgcctgttaattattcctcagactgcgtataactaatctcccgatcgaataaaattagtcgtctgacagttgattctttttcgtctgacagttgtcagacgaaagttcaacagtagtcagacgcaagtttaacaattgtcagacgattaattttatgcataaacaagattagtatcctcttcactaagaaatagtttttagcatacgaaagattaaattatactaccaaccgcctaaacgcttgtttatcattggtgaactgcgtacttttgcacgccattaaaaaaaagcaaaacaatgaccaacaaaaccaaaggttttatctatggagcgattgccgctgccagctacggtatgaatcctctttttgcacttccgctctatgcagccggaatgaatgtcgataccgttttattctaccggtacttctttgcgacaatcgtattgggtattctgatgaaaatgcagcaccagtcttttgcgcttcataaggcagacgtcttgcccttagtcattatgggattgctattctctttttcatcactacttttgtttatgagctataattatatggatgccggtattgcttctaccattctctttgtctatccggtgatggtagcagtcattatggggatattcttcaaagaaaagatttccgcaattaccgttttttccatcctgctggcactttctggtatcgccttgctctatcagggagacggaaacaaaccgctgtcgactttgggaattatctttgttctgctgtcctcactctcttatgctatatatatagtaggtgtgaaccgttcgacgctgaaaaacctgccgaccaccaagctcacattctatgccattttgttcggactatcggtttatatcgtccgtttaaatttttgtacggaactgcaaataataccgtcagcctggctctgggccgacgtgctgacactagccattctgccaactgccgtatctctgatctgtaccgcactcgccatccattatataggctctacctcaacagccatattgggtgctctggaaccagtgacagctctatttttcggtgttctcctgtttcacgaaaaactgactccccggttaatggtaggtattttaatgattatcaccgctgttaccttgattatcatcggtaagtcgctcataaaaaagatgggaatgctgttgcagatgaacaaaaaataatatacttttgctacttaatcaatcaaaatgcaattttaaatctcaaaaaatatggtagacgtaaagacttgccttgacaatgcacaagaaaaaatggatatggccatcatgtatctggaagaagcactggcacatatccgcgctggaaaagcgagtgcccgcttattagatggtatccgcgtagattcttacggaagtatggtgcctatcagcaatgtagcagcaattactactccggacgcccgcagtatcgtaatcaagccgtgggataaaagcatgttccgtgtcatcgaaaaagcaatcatcgactctgacctcggtatcatgcctgaaaacaatggtgaaatgatccgtatcggtattcctcctttgacggaagaacgtcgtaaacaactggcaaaacagtgtaaaggagaaggtgaaacggctaaagttagtgtacgtaacgctcgtcgtgacggtatcgacgcactgaagaaagctgtaaaagacggattggcagaagacgaacagaagaatgcggaagccaaactgcaaaaaatccatgataagtatatcaagcaaatcgatgatatgctggctgaaaaggataaagaaattatgactgtttaattagttgagaattgatagttgagagttgatagttactatgcagttactggataatgcaaccaattctcaactatcaactattaactatcaactaaataaatgaagggattagtaatcaaaaacacgggtagttggtatcaggtgaaaaccgatgacggacaatctatcgaatgtaaaatcaaaggtaatttccgactgaaagggattcgcagcactaatcctgtagcagtaggcgatcgtgttcagattatacttaatcaggaaggcactgcttttatcagcgaaatagaagatagaaagaactacatcgttcgccgttcttccaatctttccaaacaatcccacatccttgccgccaatctcgatcagtgtatgctggtggtaacgatcaattatcccgaaacttccactatttttattgatcgattcctcgcatccgcagaggcctatcgtgttcccgtcaaactggtatttaataaggtagatgcttacgacgaggacgaactccgctatctggacgcactcatcaacttatatacacagattggctatccctgcttcaaagtttccgcaaagaacggtaatggagtggaggaaatcaagaaagctctggaaagcaaaatcaccttattctccggacattcgggagtcggcaaatcaactcttatcaattccatactgccgggcatagaaaccagaaccggcgagatttcttcttaccataacaaaggaatgcataccaccactttctccgagatgtttcccgtagaagggaacggttatattatcgacactccgggcatcaaaggcttcggcacattcgatatggaggaagaagagatcggacactattttcctgaaatattcaaaatttctgccgactgcaaatatggtaactgcacccaccgtcatgaaccgggatgtgccgtacgcaaagcagtggaagaacatctcatcagcgaatcccgctatacctcttatctaaatatgttggaagataaagaggaagggaaataccgggctgcctactgattaactcttttttacttttttcttctttaaacctttccctttgggagaagtctaatctttgatgacatataatataattgctatatacaatactaaaccatgaataagaagactaagtggggcatcattattcttgttggtgccggaatcatcggtggaggaatctactcacaattaccgaaaaaaaacgacgaactagcagccgccgacaaagtaatgagcggcaatcagaaaagagggaaacaagtactaaatgtaaatgccaaggtcataaaaccgcaatccctgacagatgagtttaccactaccggtgtgcttctgcccgacgaagaagtggatttatctttcgagacttcgggaaaaattgtagaaatcaacttcgaagaaggaacagccgtaaagaaaggtcaattactagccaaggtaaacgaccgacagttgcaggcgcaattgcaaagattgatttcacaattgaaactggcagaagaccgtgtattccgtcaggacgctttgttgaaacgggatgctgtcagtaaagaagcctacgaacaggttaagacggatttagctaccctgaacgccgacatagaaattataaaaaccaatatcgaactgactgaacttcgcgctccgtttgacggaattatcggacttcgacaagtcagtgtcggtacgtatgcctctccgactacagtggttgccaaactgactaaaatcgctccattgaaagtggaattctccgtaccggaacgttatgccaagcaaatcaagaagggaactaacctcaacttcagtgtggaaggaacgttggatgctttcggcgcacaagtatacgctgtagaatcggctatcgacccgaatctgcatcaatttaccgctcgtgcattatactcgaatgttcatcataccttacttcccggccgttacgcaagcgtattattgaaaaaagaagaaattcctaatgcgatagccatccctacagaagcaatcgtgccggaaatgggtaaggataaagtctatctgtataaatcaggaaaagccgaaccggtggatattattaccggcatccgcacggcatctgaagtacaggcaataagagggctgcacataggagatacaatcattacttcaggaacactacagctccgcaccggacttgcagtcacacttgacaatattgattaataataccagcgccctatgaatatatccgaattaagtatacgtcgcccggtattagccacagtattaacgatcattatcctccttttcggattcatcggatacaactatctgggtgtccgcgaatatccgtcagtggataatccgatcatttctgtcagttgctcttatccgggagctaatgccgatgttatcgagaatcagataaccgaaccgttggaacagaatatcaacggtattcccggtatccgttctttgtccagtgtgagtcaacagggacaaagccgtattacagtagaatttgagttgtccgtcgatttggaaacagcagccaacgacgtgcgtgacaaggtttcacgtgcccaacgttatctgcctcgcgactgtgaccctccgactgtctcaaaagcggatgccgatgcccaaccgatcctgatggttgctcttcaaagtgataaacgttccctgttggaattaagtgaaatagcggacttgactgtaaaagaacagttacagaccatttccgatgtaagtagtgtatctatctggggagaaaagcgttactccatgcgtctctggctcgacccggttaaaatggccggctacggaatcactcctatcgacgttaaaaacgccgtagacaatgagaatgtggaacttccttccggtagtatcgaaggaaataccaccgagctgactatccgaacactgggattgatgcataccgcagatgaattcaatgatttgattatcaaagaagagaataaccgtattgtccgtttcagcgatatcggacgtgccgaactgggacctgccgacatcaagagttatatgaaaatgaacggtgttccgatggtaggtgtcgttgttattccacagccgggagccaaccatattgagattgcggatgcggtataccagcgtatggaacagatgaaaaaggacttgccggaagacgtacactataactacggttttgataataccaagtttatccgtgcgtctatcaatgaggtaaagtcaacggtgtatgaggcttttgtactcgtaattatcattatcttcctcttcctgcgtgactggcgcgttacattggtgccttgtatcgtaattcctgtctcccttatcggtgcattcttcgtcatgtatctggccggattctccatcaatgtgctttccatgctcgccatcgtactatcggtgggactggtggtagatgatgccatcgttatgacggaaaatatatacatccgtattgagaaaggaatggctccgaaagaagcgggcatagaaggagccaaagaaattttctttgccgttatttcaacgactatcacactggtagcggtattcttcccgatcgtctttatggacggaatgacgggacgactgttccgtgagttcagtatcgtaatttccggttcggttattatttcctcatttgccgcattgactttcacaccgatgctggcaacgaaattgctcataaaacgggaaaagcagagttggttctatgccaaaacagaaccattctttgaaggaatgaaccggctatacagtcggtcacttgccgctttcctcggcaaacgctggatcgctctcccatttactttcatcacgatttgcctgattggtattctatggaatgcagttcctgcggaaatggctccacttgaagaccgttcgcaaatcagtatcaatacacgaggagcagaaggtgtcacttatgaatatatccgggattatacggaagatatcaatcagctggtagactccattcttcctgatgcggaatcagtgactgcccgtgtatctagtggtagcggaaacgtgcgtatcacattgcatgacatgaaagaccgtaactacacacagatggaagttgccgagaagatttcgaaagcggtgcagaagaaaacgatggcgcgttcattcgtgcaacaacagtcttcttttggtggacgtcgtggaagtatgcctgttcaatatgtacttcaggctaccaatttggaaaagttggaagaagtactgcctaagtttatggctaaagtatatgagaatcctgtcttccagatggcggacgtcgatttgaagttcagtaagccggaagcacgtatccagatcaaccgcgacaagtccagtattatgggagtaagtaccaaaaatattgctcaaacgctgcaatatggattgagcggtcagcgtatgggatatttctatatgaacggtaagcaatatgagattcttggtgaaatcaaccgccagcaacgaaacaagccggctgacttgaaagcaatttacgttcgtagcaacagtggggatatgattcagttggataacttgattgagttggaaagcggtattgctcctccaaagttatatcgctataaccgttttgtgtcagctacgatttctgcaggattggcagatggaaaaacaatcgggcaaggtttggacgagatggataagattgccaaggaaacactggacgatactttccgcactgccctgtcgggagactcgaaagaatatcgtgaaagttcctccagtctgatgttcgcctttatcctggctatccttttgatttacctgattctggcagcccagtttgaaagtttcaaagatccattgattatcatgttgacagtgccgctggctattgccggagctttggtcttcatgtatttcggagatattacgatgaatattttcagtcagatcggtattatcatgctgatcggtctggtggcgaagaacggtattcttattgtagaatttgccaatcagaaacaggaagccggagaggataaaatgagcgccatcaaagatgctgcccttcaacgcctccgtccgattctgatgacaagtgcctctacggttttgggacttatcccgctggcatttgccaccggagaaggttgtaaccagcgtattgccatgggtacggcggtagtgggtggtatggtcgtatccactctgcttacgatgtacattgtaccggctatttacagttacatttcgactaaccgaatcaaaaaactacaagaatgaaacagaaaggaatttgcatgaaacgcatcatttatatcaccattgcatgtgccttcttatcagtctcttttgcaaaggcacaagttctcactctcaaggagtgtctggaagaaggattgcaaaacaattactctttacgtatcatccataacgaagagcagatcagcaaaaacaacgcaacgttgggaaatgcaggttacctgcctacactggacttctctgccggatataccggaaacctggacaatattgagaccaaggcgcgtgctaccggagaaataacaaagaacaacggagtctacgatcagacagttaatgtcggtcttaacctcaactggactattttcgacggattcaatatcagtaccacctacaaacagttgaaagagctggaacgtcagggggaaaccaacacgcgtattgccattgaagattttatcgctgccctgacttccgaatactataattttatccagcagaagattcgtctgaaaaactttcattatgcaatgtcactttccaaagagcgcttgcgcatagccgaggctagtcacctggtcggtaagttttcagggctggattatcagcaggcaaaggtggatttcaatgcagacagtgcccaatacatcaaacaacaggaattgctacattcttcacgcatccagttgaatgaactgatggctaacaacaatgtcaatcaaaacattattatcaaagactccactatcgacgtacacagcgacttgcaatttgatgatttgtggaattctacgttagcaaccaatgcttctttgctcaaggccgatcaaaacacagtacttgcccaattggactacaagaaaataaactcacgcaactatccatatctcaaattaaataccggatatggatatacgttcaacaagtatgacatcaatgcaaacagcagaagaggtgaactgggcttcaatgccggaataactgtcggttttaatatcttcgacggtaatcgtcgccgcgaaaagagaaatgcaagtctggctttcaagaatcgtcgcctggaacgacaggacttggaattagcacttcgctctgatctcagtaacctatggcaagcctatcgcaacaatcttcaattgctgaatctggaacgtcaaaacctgataaccgccaaagataatcacgatattgccatggaccgttatatacagggagacctctccggttttgaagtgcgtgaagcacaaaaaagtttgttagatgcagaggaacgcatcctctctgctgaatataatacgaaactttgcgaaatatccctgttacaaatcagcggaaagattacgaaatatctggaataaggaagtagtttccatttattttttgattgggttaatcttcttatcgggagggttaacccaatttttactctataaaaaacagttattacatatcagtatttttctttcttcatacatttgcatactataaaaacattaaataataaagccatgagaaaaccaggtcttttcttactgctactttttatcctgacaaacgcctcagcccaaaaagcaacagactacagaaaacaacaaaattacaaagaatgggtacacatcgctcctaaatttgacgacgatttcttcaagacggaagaagcccaacgcattggtgacaacgtgttactgtatcagcaaatcaccggaggatggccaaaaaatatctatatgccggcagaactgacagaacaggaatataaagcggcactaaaagccaaagaggatatcaaccaaagcacaatcgacaacaatgccaccacgacagaaatagaatatctggcacgactttatctggctacacagaaagagaaatataaagaaggagtgctgaacggtattcaatatctgctcaaatcgcagtatgaaaacggaggatggcctcaattttatccacgtcccaaaggttattatgtacaaatcacctacaatgacaatgcaatggtaagagtcatgaatcaacttcggagcatatacgaaaagaaagctccatatacttttcttcctgacaatatctgcgaacaagcacgcaatgcattcaacaaaggtatagagtgtatactcaaaacgcaggtgtgccaaaatggtgaattaacagtatggtgcgcccaacacgaccgtgtcactttggaaccctgcaaagcacgtgcttatgaacttccgtcactaagcggacaagagtcggacaatattgtattgctgttgatgtcacttcctaatccatccacagacattgtaaaatccatagaaggagcaatcaaatggttccaaaagtctaaaataaaaggaatacagaaggaatatttcactaacggtgaaggtaaaaaagactatcgtatggttccctgtgaagactgtccaactctctgggcacgtttttatgaactggaaacgaatcggccttttttctgcgaccgtgacggcattaaaaaatatgatatatcggaaatcgggcatgagcgccggaatggttatagttggtataacaaagatggtagtaaggtattgaagagatatgaaaaatggaaaaaagaacagaacaagtaatcacaaatgatgaaaggctgatatctacactacaaaaataaatatccggaaagtctttaagtcctcaaaagatgaaatcccctcactacattgcagagtgaggggattttataaattcagggcatttagcctcttcttaaagttttatcccaacaggttaaaaccggttattttgtgcaattccacggtttcaactgtttgaagaagtcattacccttatcatccaccaagataaatgcagggaagttttctacttcaattttccagatggcttccatacccaattccggatattccacacattcgatgctcttgatgttattctgtgcaaggatagctgccggacctccgatagagccaagatagaaaccaccatatttcttacaagcatctgtcacttgctggctacggttaccttttgccaacatgaccatgctgccgccatgactttggaacagttctacataagagtccatacgtcctgctgtagtaggacccatagaaccacaagccatgccttccggagtttttgccggacctgcataataaataggatgatccttaatatattgtggcaagtcttcgccgcgatccaaacgttctttcagtttagcatgggcgatgtcacgacctacgatgatcgttccgttcaatgacagacgagtagctaccggatatttagtcagctctttcaggatttcaggcatcggacggttcaggtcgatctttacaacatcaccttcacctgcttgacgcagttctacaggaataagttcgcccggatttgaatccagtttctcaatccagataccttccttattgattttacatttgatgttacggtcggcagagcaagatactcccaagcctaccggacaagaagcaccgtgacgaggcaaacggatgatgcgtacgtcatgagcaagatatttacctccgaattgcgcgcccaatccaattttgtgagcttctgccaaaacttctttttccagttcgatgtcgcggaatgcacggccatattcgtttccagtagtcggcaagttatcatagaaatgagtagaagccagcttcactgtcaataagttcttttcagcagaagttccaccgatcacgaaagcgatatgataaggagggcaagcggctgttcccaatgttttcattttttcaaccaggaatggaaccagtgtaccgggattcaggatcgcttttgtttcctgatacaaatatgtcttgttggcagaaccaccaccttttgttacgcaaaggaattcgtattccataccttcggtagcttcgatgtcaatctgtgcagggaggttacattttgtatttacctcatcatacatattcaaaggcgcattctgtgaataacgcaagttctcttcagtgtatgttttatatacgcccagtgaaagcgcttcttcatcagaatatccagtccatacctgctgtcctttttcaccatggataatagcagtaccagtgtcctgacagaaaggaagtacaccttttgaagcaacttccgcgttacgcaggaaagtcaatgccacatacttatcgttttcacttgcttccggatcactcagaatcttagcaacttgttcgttgtgcgaacgacgaagcatgaatgatacatcacgaaaagctgcattagccatcgcagtcaaaccttctttctcaattttcaggataggatttccttcaaactcgcttactgatacatagtcttttgtaagcagataatactcagttgtatcttttcccttttcaaacatgggctgatacttaaacggaggtgttgccataagtttcttattttattacgtaatgttagttagtgtggcaaaggtagtaattaagaatgaagaatggcgaatgatgaatgaagaattaagaatgaataacggagaaaagcaggaacagcaaaagacaatcataaacaataaacaacgagcggtaaacaagctatgccattcattgacatctgccgttcaccactcactattttatttacagtttgctatttatcatatcctgtttatcatccacagttcgccatctgccactcctattatgattcgattgcttcaatccgtttgattaactcgtttccaagagctgttttatcttcaatatgtttcaagacggcagtcacaaaggtattactttcgaaatcaccgcgtacttgctcaaaatcctgcttcatttcgtcgtgggagccgtcagcaccaaatccggtcatggaagacaacgaaaattctttcttggcatcctcatataccatcttatccaatccgacaacagcttgctgccacgctttcacaataccgatgatatcttgtgccgtaatcgtttccggatctaagccatagaattcctgaatcttatgataagcccatgtccattcataggtataataattctcgtgcatttccgcgaaacttgcattgatggatttcaaacgattgactgttccattctcaataccatccaacaatcggtcgatttcactcttgggagcaatcagtccggaaacatccacccattcgccaagtccgatttccgtgtcaggtttcagtcgctgacggatttcttcattggtctggaaattaataccctccaatcgttttatgatggagtttcccaagaacttgtgaatggcgatttcataaaaacgaattccgttattcagagaagagttcttgattttagcactctggtaggagtagatctctgaagtttcaccggatacacgtttcaattctttcaaaatggaacgtcctttaaacatcttctgaatggtataaggactcagcaggttataattgatataatccagccggttcggatcttttcgcttatcacgctttggccatttctgtgcgtcacggatagtacctacacttctcaaattaactcccggaaccagataagtggtattccgctgctctatcaggtaagagaaaggaagattggaagtatcggcatgattaacatgacgtcccattaccaaagagaaagccccgacacgtgccggccacaggatatatgaatcggaagtggtcttcgctcctctctccatcgttccctgatggataggacctaacttatacatgtgattactctgattggaccccgaacccgcattcataaacgagaacataccggcaatcaataaagtagatttatggtgtgtcacagtgaaaggacctgcaaaaatagcacatgcctcaccgttctctccctgacaattactgaagaataaagaatcggaagcggaataattgtgtcccagtttacaggattgtccgacgaaacaacgagtcaacatcgtgccgtcatccactttagagccggaagagatgataaagtcatcacagattacaccatgtccgatatgtacaggtgccgtcacattactattgacgctgccattggataagcggcaggtcccacagatatggcagtaatcaccaatccggacattcttgatcgagcccgtattgagaatcatcacatgattgccaatactgccgacagcagaagcatgtttattggaataataatccgcaatagatttcatacggtttatcagctcgggacgatggcggtacagtgcaagaatatatgcctggtgcgcagacaatttatcgttcatcaacacctcacggcctcctgtttcattcaagacagccacttctaccccattaccaaaagtgcttaacctatccactaaaataatatctacattctcaatgaaggtgtcactgccaatctcataattagcaatatagttctgtatattctcaatacagcagttatcgcccaccgacacattgtgcaacgtcacatgacgtaatcccgaatgtttcttgattccccccggcaatgtaaattcagcttcgaatacccccagttttacttcacccgagaaacgggtatgatggacgtactcacaattaaaaccctctgccactgatacatttccccaatcatcggccagacatgactggctcttcaactgaagtatctcatcttcagtcaatctacgatagtctttcatcttaataatgtgttaatgtgcccatatgccaatgtgccaattctgatgcagtatgcgcaaccaattggcacatcagcacattagcatattgattattcttcctcttcttcgtaggtctgataaagaaaatcgttatagggatatttctgaacgtgtaattctttcactcgctgataaactacatttttcagttcgtctatattgattcgttcgcgggcggaaataaagaggcagttatcctccatttttgccatccacgtcttcatcagttcttcgagtgttaagttttcctttgttcggggggtaaggtcgtccggcgctttctccacgtaggtgtaagcgtctattttattaaatacaagtatcataggtttgccactgcctccaatctctgccagggtcttgttcaccacctcaatctgttcctcaaatccggggtgggaaatatcgactacgtgcacaagcaaatctgcttcacgtacctcatccagggtagatttaaaagattctaccaagtcggtaggtaacttgcgaataaaccctactgtatctgacaacaggaacggtagattatcgataatcactttgcgcacagtagtgtctaaagtagcgaacagtttgttttccgcaaacacttcactcttggagagaagattcatcatggttgattttcccacattggtataaccaaccagtgcaacacgtatcatgcgtccgcgattcttgcgttgggtagctttctgcttgtcaatctccgccagacgttctttcagcaatgacatacggttcaggatgatacggcggtccatctcaagctgtgtttcacccggaccacgaagtcccacggaacctttgccaccaccggcaccggaaccacctccctggcgttccaagtgagtccaaagccgctgcaaacgcggcaacatatatttatactgtgccagttctacctgtgtcttcgcattggctgtctgcgcacgcatggcaaatatatcaagaatcagtgaagtacggtccagtatcttcactttcagttcagcttcaatattacgaatctgtttcgcagaaagctcatcatcaaagatgaccattcctacttcacgttctgcttcctcttcgtcatggatatattgtctgatttcttccaactttccttttccaacataagtcacagagttagccgtcggcaacttctgtgtaaatcgtttcacaacttccgccccagccgtctcggcaaggaaagccagttcatccagatactcgtttgttttacgctcatcctgcgtctgtgtgatgagtcctacaagcactgctgtttctactttggcttcggatattacaaattctttcattctttacttctattatatataataatgtgggcgcaaatataacaaaaaaaaagaggacaatgttttattgtcctctttttcgtatcatttatggtaattcaattataaatcaaaccatagtttttcccagattttcggagattctttcggtgcattaatattagctgtcatttcttcaggactatattcccatcttctgatcaattcttttgaagttgcatcttccgggacttgcaatgtcgggacctcgtttccggcagtaccagatcgcctccattgtacaaactcctcaaacggacgatccatcaaatcaatccattgctgcatatgaatctcatacagagctttttcctgggtcatcgttgtcaattccggtaaacctgtaacatatgtatcaatatcggattccgcaactccataaaaagcacatgcttcacgaattcctttcaggtacagttcattagctttcgacagattttgagcaactcctaatccgcgcgcataagcttctgcttccaaaagtagctgttcttgacaagaataaatcaattccggagcgtctcttctgaaaaggtagttgcttacaacagatgacagtagattttcttcatcatccgtctttgcagcctctctattacccaacccccggtatacaccatccgcacccggttcaaaataacagggaatacggggatcattacgttcttgcatcggtttcaacatataattgctggcaaagaacaatatttgtgtccccccaaccaattctataagttcatatttagggttctggttacccggatctgtagagtaaggaaataccaaattgtccgctgctgatgcaaccattcctccagcctgcagcaacgtaccaatagcagcagccttagaagggtctttatctaccataaccatcaatgttctgaattttaaagactttgccaaagtcatccatttgttcatatcacctttgtaatagatatcgtactcatcaattgcattagcatcattcagatctataagctgtaatgcctcatcaagtaatgacaaaacaccattcaatacactttcctgagaatcaaatttcggatatttaattgttccgttccaggattctgtgaaaggaatatctccccacaacatcgttgcctcatacatatgctcagccaaaagaatcttacactgcgcaatagcattgtgattcaccggttctgactcttctgcatttttaatagctaacatcaaattattgccacctacagaataataatgtttccagacattccctgtactataaggagaaatagtatatacagattcatcccagccaccgtaatcaagtccaccatcaacttgacactgcgaactcatagataaaggaatataaaagtcaccaccagtgcgtgttccagcccagtttacagctacatagttaaacaaatacccgggatcaactttctcggcagtattgggatcatggttaatatcgagccaatcgctacatgaagttaaacatgccaaagcgctcaatgcgtatgttaatattttctttttcattatcatattcgtttaaatcttacaatgttaatctgacattaaatccaaaacttctggtagaaggtatgctgttaaactctacaccacccccaatctgagaaggaccgaagaagttagcttccggatcaatatgtggcacatgatctttaataatccataagttacgtgcctcaaaacctaaatccaatgatttaacaaaaaagctcttgaaccatttgcgtgggaagctataagacaactgtacctctctgagttttacaaatgatgcattatagatattcccttcattattactagaattggatatatgctgccaataatcctgcatacttttcacaggaacatcattaggtctatatgttccatcatcctgaaggattacacccggctcaataaaggaagcatcttcacggtgagctattgtttcagcagccaaaccgctacttcttaaattagctacagtctctgaatacaaagaacctccatgacggatatcaatcaagaaactcaaggtaactcccttataagtaaatgtattgttgattcccatcgtaaaatcaggatatacatctcctaaacgcacgttattaacagtttctctcaaacctgttttagaattaatcacataatttccttggtcatcacgtttccaacccgtgccatacaagccaaacgaatctcctttagcagccttaatttgtaaaccgctcagtccactcgttaacgtatattcatcaagtccttcagctaactcctccactgtctgcttatttgaagcaaatgttgcatccaggtcccatttaaaatcacgtgtttccacaggagtcaaccccaaagttacttcaacacctttattggcaatcttcccggcattaatattattggcaaagtagcctgttgacaatgggacatcaatacttacaatctgattctttgtaatattgctataataagtcatatctaacctaatttttccaccgaagaaacgcaaatcagctccaacttcaaaagaactttgattttgcggcttcaaattctcatttggtaagacacgaggtcccgtaaagccaactaatcccatatgggggaaagtgttaacattacccagatattgcaaaaagtaagtactagcgggagtatatttaaatgccaaattgtacggatcttcatcactacccacattagcataactcaaacgaaccttaccaaaattcagaatatctttgttttccatcaactccgtaaaaataaaactaccacttatggaaggatagaaataggaacgattattgatcggtagagtagacgaccagtcattacgtcctgttacatttacgaaaagcatatctttgtatcccaaactaatatctccatataaaccaacaagacgtttcttttcataataatttaccggagtagtagacttcgcattagtatatgtgtatagcccatcaacaaccagattctgcgcctgcacattttcattcttccattcctcctgatagagattatgccccatcattaccttaaaatgatagtcatttgcaaaagtcttctcgtaagaaaccattaagtcattatttataattcttttatacaaattccaagtctggaactttccgttcaaggctcctacagtaccttttgcatataccttacgccttccttctgtgtaaaaatctgttccggcattattggtgatagtcagtccttcaatcggtttataagtcaatgtgatattaccaatcatacgatctaaattattggtaaacttattcttattaataatccaatatggattattacttttaccttccggatctaatgtgatttgctttccattctcatccacccaattcttttgaatatcatgtatatcaatagttctcggcaatccattaatcaatggaatcagtaggttactatcatttgcaccttgcgctggacgaccttcagagtcggaacgtatatattgagcagaaatacgacctgtgaagttcttagtaaaattcatacccgcattgacagaaaaagcgtatttattatagtcagatccaggtacaacaccagtctgattagtagaagtaaagctcaaacggaagtccgccttttcaccaccccccgcaactgatacattattaatataactcattcccgtttcatagaaatcctttacattatcaggatttgccttcaaagtcactttatcacctttgtaatctgtaaactgctgatcttgtaccgatgagatcttcggtccccaaccattcaacattttcacattatatacaccataactgccttgtgcatattcattttgaaagtcaggtaactttagtacattttcaaatcgtgtagaagagtttactgttacaaacaccggtgagttcttctttcccttcttagtagtaataacgatagcaccatcctttgcacgcgctccatacaatgctgttgcagctgctcccttcaatacattgatagattcaatatcatctgaattaatatcccctgcacgattaccgacatcaactataccattagttctgtcagggttataggaaccattgtcaattggaagcccgtcaataataaataaaggagaagaaacggtaccaatagacgaagctccacgaatctgtatacttgaactaccacctaccgtaccagatgattgggctatttgcagtcccgcaatcttaccagacaatgaattaagtacattactttcacgtgctttagttatttcatctcccttcacactagatacggcataacctagggatttttccgatcgcttaatccccatagctgtcactacaacctcatctagattttgggaatcagactttagcacaacttttaaagttggtttgatcaccacttcttgtgtctgcataccaatatacgaaatctgcaaagtctttgcagaacttggtacattcgacaaattaaaattaccatctacatctgtgattgtacccagagtggtaccttttaccaacacagaagcgccaacaactggctgcccgtcttcttcagaaatcacaacgcctgtgaccttttgagtctgggcagttactaggcctatgcccacaaaaaggcatgccaataacagcattaattttcttttcataaattctctcttaaagtttaactttacattatttgtatctttactctaacaatttgcaaatatattaataaaactgaaactagcaattatattaataaaaaaaggttgcaaatataacattttgttattttataagctgtatttatgccgataagcatatttttttcaaccaaaagctttgattgctaaaacagcaattgacactttgcataagcaaaatgcctcttttaatatttcttttactcgtttttagtcataaaacacctttaaaagccattctttttgcttttttcgtgaaaaagcgaataaaaaagtggcatttaatttaaagttttgtgaataccaagtgatttgaagatttattttttagagatattaatgcttattcgcctctgatatagcacagaattacgtctaatttgttctattattaattaaaaaatgaaagtatggaaaagatcagttacaaccttgtgtttaacagaaagaagagattgaataaaagaggaatggcattagttcaggtagaagcctatctgaacaggaaaaagatgtatttctccaccaaaatatatctcaaaccggaacagtgggatgccaaacgaaaaatggtgaagaatcatcctaatgcgaatgttttgaatcgtatgttatatgaaaatatagcagctattgagcaaacagaacttggactatggcaacagggaaagtccatatcgttagatttattaaaaaattctattgataaacctctaagcaatggaaggtcatttttgactttttttaaagaggagatagccaattcttctttgaaagaaagtacccgtcaaaatcacctttccacgcttgaattacttcaggagttcaagaaagaggtattatttaccgatttgacatttgagtttgtgtcttcatttgataattacctgcaatctaaaggttatcaccttaatactattgccaagcacatgaagcatctgaaacgatatattaatgttgcaataaataaggagtatatggatatacagaagtatgcctttagaaaatataaaattaaaagtatagaaggaagccatacacacttagctccggaagagttacacaaatttgagaatttgcagctgactggaagatatacgagactgcaaaaaacaaaagatgcttttttattttgctgttatgctggattacgatattctgatttcactaatctgacctctgcaaatattgttgagttccatcaggagacttggataatatacaaatctgtcaaaacaggtatggaggtacgccttcctttatatttattatttgagggtaaaggaatccagatattacaacgctataaagatgacctcaatagttttttcaagttgaaagacaattctaatattaataaggaattaaacatattggcaggcttggctaaaattgataaacgtgtatcgtttcacaccgcccgtcatacaaatgctaccttattattatataatggtgccaatataactactgtacaaaaactgttaggacataaaagtgtaaagaccacgcaggtatatgcgaatataatggatattacagtggtgcgtgatcttgagaaaactgcctcatcaaaaaaataataataagcacaaaaactaaacgaaagtgttctgtttttaagatttggttatagaaatggaaggtataattttctctaatagaagaaagtgtgtataattaaatgaaagaatatgcaatataagttccgaaaacgcatatatataatctaaagatacatcataattacgaatattatcactcgtcccatttaaaggaataaagcgttcctttaaaaggaacgagtcattggtcgtagagaagcccttgctttctttaaaaggaaaggattaaaagctaatttataaacttgacagcctctaatagctattaaaatccggcatttggggttctttcattttagcatcagataaatgataaatacctctttttgcataattagatgtaattacacaatctctttgatacagaaaaagcatataaccatccaatataaatattcatcaatcatattctctgcgattttggaggatatttgaatccacccctgcatattttaaaatatacagtaataaaatatgcattttttcatctggagtttttctttttcttagattaccgtttgctaatgaatatattattatagtcaataattattggatataatttagaacaagaaaaccatcttcaacagttaagatggaaataagttttagcttatatcatataagataagaacttaaataattaattaatagatggttatgccctatttttgatagaaatctggtatcataaatcagtaaactaatatgtttggtaggtgcttaatatattgataatctgcataataactacaacaaaaaaatatttccaaaggaaagcaaacatcatatatattgttagtaatcaacatattatagttgtatttagttctgcaaagactttgcagatttcgtatatcggaatgcaaacacaagaggtagttattaagccaaatttgagagttgtattaaaggctgacgcccaaaagctagacgaagtagtagttaccgctatgggtatttcacgtgagaagaaagcattgggatatgccgtacaagacgtcaaatcggatgcgttgacacgtgctgctaatacagatttagcgggagccttacaaggaaaagtatcaggtattgacatcaccccatcatcaggtatgccgggtgcttcttcaaagatcacgattcgcggttctcgttctttcactggagacaatactccattgtatgtaattgatggtatgcctatcgcttctaccgcagatgtgagtacttctcttaccgatggagcgtatggaacggactatgctaaccgtgctgtcgacattgaccctaatgatatagaaagtatcaatatattaaagggacaagccgcttctgctttgtatggtatgagagcttccaatggtgttatcgttatcaccaccaaaagtggtaaaggagcagataaaggaaaaccgactattactttcagtactaacctttcctttgataagatttcaactcttccggaactgcaacaagaatatgcacaaggttcaggcggtactttcgatccgtcatctcctttcgcatggggtcctaagatttccgaattagctaacgaccctacctacggaggaaatacagacaacagttacaccagccaatatggtaaacagtccggaaaatactatgttcctcaacttgcagctgccggcatgaatccgtgggctactccacaagcatataacaacatgaaggacttttttgaaacaggtgtatcttggagcaataacgtcaatgtagcccagagattcgacaaaggtaactactccttttctttgggtaacaccaccagtaatggtatcgttccatcaaccggtatggatagatataacgtgaaaatgtccgccgaagcacaactccatcctaactggactaccggatttaatggaaactttgtgacttcaaaaatctccaaacagtctacagccaacaccagtgtggttgctacgatctataatgcacccgtcagctataatatggccggtattccttctcacatagaaggcgacccttacacacaaaatacatatcgagacagctggatcgacgatgcatattgggcagttgacaataaccagttctccgaacgttcacaacgtttcttcggaaatgctttcgtgaaatatactactaaatttggaacagacaaccacaaactggatattaaataccagatcggtgatgacgcttacactaccaactattcagaaatctacggatatggaagtacttgggcacctacaggtgaagattcagagtaccattacactgttaatgaattaaactcactgttaactgccgcttacacatggaatatcaacgaagaatggaccttggatgcattgattggtaatgagtttgtggataaaaagacaaaatatgaatacgcatatagcatgaatttcaatttccccggatggaatcatctgaataatgcttctgtattctccaacgaaagccaatacaacaagaaacggacggtaggtaatttcgccaacttgtcagtagcatggaaaaacatgctctatctaagtggaagtatacgtaacgatattgtttcaagcatgccacgtgacaaccgttctttcacttatccttcagtgtcattaggattcatcttcaccgaactggctcccctgaagaataacatattgactttcggtaagatacgtgcttcttatgcagaagttggtatggccggtgattatactcaaagttattattatactccgtcttatggtggcggcttctatatgggaaatcctattgtttatccaattaatggagcaatggcttacattccatattataaggtatatgaccctaacttaaaaccacaaaatacaaaatcatacgaactgggagcagatcttactttcttaaacggactggtaaccttgaattatacctattcacgtcagaatgtgaaagatcagatattcgaagttcctttggcaggttcaaccggagcctcaagtatgataatgaatggaggtaaaatccacacaaatacccacgagttgacattgggcgtatctccggtagataccaaaaacttcaaactcgacttcgctttcaacttctccaaaatcgacaattacgtagacgaattggctccaggagtagaaagtattatgttaggaggatttgtaactccgcaggtacgtgccggaattggtgacaagttccctgtgatctatggaaaaagctatatgcgtaatgacgaaggcaagattgtagtagacaaaaacggacttcccatgcagggagaagatgcggttatcggaactgtatctcctgacttccgtttaggtttcaatacaaatatcgaattgtacaagttccgtatttctgcagtattcgactggaaacaaggaggacagatgtatagtggtaccgcaggtgaaatgaactattacggtgtgagcaaattatctggtgatatgcgtaataccgaattcattgtggaaaactccgttaaagaaacaggaaaagatgcggatggtaattcaatctatgcccccaatgatataaaagtaacagatgctcaagcatatttcaccagaagaagatcaattgacgaatcttacatttatgataattcttatatcaaattgcgtgaattatctgtaagttatccggttttctcaaagaaatggctgaatgtgaacgttaatgtttttgcccgcaacattttggtttggtctgaaatgaaaggtttcgatccggaagcttcacaaggtaatgacaacatgggaggtgcattcgaacgtttctctcttccgggaacagccagctatggttttggatttaatgtaaaattctaattagctaaaaagaaagatgaaaacatataatataattaaaggtatttttgccgctactgttttatcagttgttttttccggatgctcggaagatgcaatggatagaatcaacaaggaccacggccatacgcaaagcgtagccgcaagattcattctgacagatgtgataacctctactgcattttccaatgcaggaggtgatttcaatacttatctatctgcttacattgaatatgaagtaggtgttgacaaccaattgtattatgcagaaaccagagagagcgaaccgacctcatcttccactttcaacaatacatggaatggtctgtattcaacattgaaatccgcccgtatcattatcaatcaatgcagcgagggaggcatagaccatgggaattatgtaaccaagggtatggctgaagtgttggctgcttataattgcgcattgatagccgatatgtttggagatgctccatgtagtcaggctgcattaattgacgaaaacggttctcctgtttacctaactcctaaaatggataagcaagaagaaatctatacccaagcaatgcaatatctggatgatgccattgcagacttacagaaagaagatctgatagacccggaagctcaagatttgctgtaccagggtgatgctgaaaaatggcttaagttagcatatggtctgaaagcacgctacacgatgcatcttcttaaaagatctgccaacaaagacgcggatatggagaaggtgttggaatatgtaaataactctttcgaaagcgcagaagaacaagcagcattcgacgtatatgacgctaataacataaatccgctttatggtttctttgtggcacgtgccggattaggtgcaagcgaaagcatgagaagcaaactggcagaatacaatgacccacgtctgtccagagctttcatcactaaacagggtacctccggaaaagaacaagctccgggaaccgcagacaacgccgtatatgcgcctaacggtacaccagaacaaggcacttccaaatatggaacttctttatttatgtattctatatcagcaccaacactgttgttgagttatcatgaattaaaattcctggaagcagaagctctgtgcagattggaacgtgatgctaaaagtgcattaaaagatgcagtagtggctggactgttaaatgcggaaaacagctttactatttcaagaaaagagttgggcaaaacactcatcaatgcagcaagcagtattacggaagctgaagccgaaagttactttgacaatacgatagaggccaaatatacagctgaacctttgaaaacaacaatgactcaaaaatacttcgcattatggggagcttcaggtgaagcgacagaatcttacaatgatgttcgcagaatgaaaggactaggcgaaaactttattgagctaaaaaatccaaactctttcccattacgttgtccttatggcaatagcgacacaacaacgaatgccgaagtgaaagcagcatacggaaacggacaatatgtgtatagtgaaaatgtttggtgggcaggcggaagcagataatccattgacttgaatcatataaatgagactgaattctccaggggaaaggtgggaattcagtctcatttctttatattataataataaaagcctttattatttatacaaaaatcccactctccccctttcttatttcatgtaatttcatagagcatactcttttcattcatcctgccgaccaacacattttctctataaaagtaattcaaaataaaaaatgttccttatatttgccaatggtttacgggtttatttacatatactttttaaatataaagagtatttattttcgtctataaacaaagtagcttttgaatgataactctttaaacttcctctgaaaaggattgaagacactaaatatatggatcattttttagagaaaatagacacacacactttatcactcctacaacaaggtgacgaaaaggctttcgacactattttctggaaatataatccccgtgtatttcattttattcattcccttctatatgataaaatactagcagaggacctcactcaaaatgtatttctgaagatctgggaaagacatcaggatatcaaaccggaagaaggctttgaagcgtatcttttcacaatagcacgcaacatggtatataaggaaacagaaaaacggctactttcggaacgttttctggattcaatcaaacaaactgatgccgacaagcactttgaaatagatgttgacaccgactccctacaagaatatatagacgagctggtagaacagctaccctcttcccggaagaaaatctacctcatgagcaagaaacaacatctgacaaataaagaaatagccgcccaactatctttgtcagaaaaaacagttgaaacgcaattatatcgtgcccttcatttcttacgttctaaattagccaatgaaattgtagctttggctctattttttctttcttctaattttaaatagtgttaaatacagagtaaaatctttgcaccctgtaaggattcttggctccatggagatatacataataaaagcccatggagaagaatacgaatatattattattagaatgttttatgcggggagaaacctctccggatgaagaacaaatactatctgactggctccacagtcaggaagcaaaagagcagttatccaactattatcaggaaacctggaaaggctctaataacaagctcattgccgaagtacaatgtccgttatttaaaactgcgtaatctggaatttggttacaccttccccaaagagtggctgcaaaaatgcagaattaacagtctaaggttatatcttgccggacagaacctgtttacactcaccaatgtacctatcgatccggaagtttcagccggtaacggaacagcttacccgagtatgcgaattatcaatctgggtttaacacttaaattctaaaagcaatgaaatatataaaaggatacctgttattgggtttaactttgatattaggatcttgttctgattttttagatcgtgatcccgatcagatattgacaaatgaccagatcttcagcgatgctaaaatgataaactccgtattggccggtttttatggagatacagagaattggggacaaagttttgccactcccgccagctttactaaagtggacgacggttgcgtgactgatggtggccgtgataacatgcaggaatacagtgacaatcaatggcgagtttatccatataaatatattcgtaatttaaatcagttcctggcgggattaagagctacaaccgtacttgaatctacagagaaattgcgatatgaaggcgaaattcgcttcttacgcgcctgggcatattttagtatgtgcagaggtttaggcggtgtacctattgtgaatgataacgtatacgaatatgaggcagggagggatgtttcaggtttggctgttccccgttccaaagaatcagaagtctacgattatatcatcaatgaatgtgccactatcgcagattacctgcctacaaagcccaccaccaatgccgcccgtgccacacgttgggctgccctgatgttaaaggcacgtgctgccgtttatgcaggatcattggccaactacaataataagatggttgctcctatacgcacagaaggaaatgaagtcggtattccggcggaaatggctaccccatattacgaaacagcattggaagcagccaaagaagtgataactcaagcttctgcctattataacctggacataacgattcgtaatgatctgggacagaatttttataatgcagtctgtgtcaaagagaataatcatgaagtgatctgggccaaagattatgcatatccaggagccacccatggattcacacaaaagaatattcccgcttctctagcagaagatcaggaacgttgttattccggcgcagtattaaatctggtagaagcatttgaatacaaagacaaccgcgacggcacaatcaaagttaaggatgaatccggaaattacatcatgtacagtcggccggaagatgcctttgccaataaagatgcccggttgtggggaaccgtactttatccgggagccaaattcagaggtagtgaagtagtgttgcaagccggtcagaaagtgcccgacggaaacggaaattggaaagaaatcataggtaaagccgattcttacgatgacaataaccgcctgataacttctatcaacggaccaatggaatcaaatgaaatccgtataaacaaaacaggtttcttcttccgcaaattcctggacgaaaccatcggtgcttctaccaattcgaagatgagtaccatgtggtatcctcgtttccgtatttcagaagcatatatgatagcttgtgaggctgcttatgagctcaataaaaccggagaagatgatccgctgaactacatcaatcctgttcgtacacgcgccggcatcagcgaactggaatcaatcacatttgaagatattgtccgcgaatatcgggtggaatttgcattggaagatcatcgttactgggatctgaaacgctggcgcctggctcacgaaatctgggatggtaattcggaaaatccggatgcacagctctacgaactattcccttatcaggttaatgatccgggtagcgccaatgacaagatgtgggtattcgacaaaaagaaagcctacatggttccttacccccgctatttccagatgaagaactattataacttcttcgataacagctggctcaacaagaacccgttattagtgaaaaatccctatcagtaaaacataaaactgtaaaacaatgaaaaaaataagaactatattttctttgctttcactttccctgcttgccataagttgcggtttagacaattacgacgaaccagaatcatttctggaagggaaaatcacgtataagggaaaacaactcggtttgaaaggtacaaacggaggtattcaactacaattgtatcaggatggttatgccaaccatgatcctatcaccgtgtatgccacacaggacggaactttctctgcagtacttttcgatggtccgtacaaactggtaactaaagacaaaaacggtccctgggtgaataaccgcgataccatatatgtggaagtaaaaggaaaaacacaatgtgaagtaaaagtcaccccttattttacaatatcagacgaaaatatcacattagataacaacatcgtatccggcacgtgcaatatacagcaaatagtacaggatgccaagataagccaggcaatgctactcgtcagcaaaacaacttttgttgacgagaacacgaatatagcccggcaaaatttatccaatataaatcccggagtaacaaatatttcgctggatattacgagtaaccagaatgtacagtcagccaaagccctattcgcccgcatcggtgtaaaagcgaacggagcggaccaagctgtctattcagaaattttcagactgaaataattcatctaagaaataatttgtcagtatatttatttaataaatatactgacaaaaaaaataaaacaaaattatatgacaaacaaaaacatgttattaatgggaactgcatccttactgtccctacatgcagcagcccagaatgacccaaagcccaacattgttttaatcatggtggacgatatgggatattccgatctagggtgctacggaggagaaattcctacgcccaatctggataatctggcaaaaaaaggagtacgctttacccatttctgcaacacaggacgctcctgcccttcccgtgccagtctactgaccggactttatccccaacaggcaggtatcggaatgatgtccgaagatcctcactctgccgaagatcacggagtgcatggatatatgggatatttgaaccgtaattcagtcaccatagcagaagtgctgaaagaagccggttatcacacctatatgtcgggaaaatggcatgtcggtatgcacggacaggaaaaatggccgttgcaacgtggctttgatcatttttatggtatcttgtcaggagcttgcagttatctgcaacctcatggagatcgcaatctgactttagacaatcaacagttgcctccaccggaacaaccttattacactactgacgcatttactgattatgcgattaaatttgtcgacgaacgccccaaagatgacaatccgttcttcctttacctggcatacaacgctccccattggtcgttacatgctaaacaggaggatatagacaaatttgtaggcaagtaccggaaaggttggcagaaagtacgtgaagcccgtttgaaacgtatgattaaaatgggattggtagacaaaaattgggatcttgctcaatgggagggtcgccaatggtccgaactgaccgaagatgaacaaatagaactggatagaagaatgtcagtatatgcggcacaagttcattgcatggattataatgtgggacggttaataaagtacctggaagaaaaaggggagctgaataacaccttacttattttcttgtcggataatggtgcatgtgccgagcctcatcgtgagaaaggtttcggaaccatcgatatgattaacaatccggatgaatgggtaaatccatcctatggcctgccatgggcacaggttagcaatactccataccgtaagtataaagtaagagcgtatgaaggcgggacctccactccattgattatttcctggcccgacaagtatgcaaaatacaatggcgagataagacacaacagagctttcctgcccgacattatggcaaccttcatcgatgcagcggaaacgacctatccgaagacttatcatggaggaaatgagatcattcctttggaaggcgcaagcatgctaccgatactaaccaatacagacaccgaattgcacgaatatatttttggtgaacactttgacaactgtgtagtatggtggaaaaactggaaagccgttaaagaccagaactctaaagtatgggaacttttcaacttggagaaagaccgtacagaacgtgttgatttatccagagaaaatcccaagattctaaaacaactggtagacgaatggaacaaatgggcaaatacacattatgtatatcccaaaggaaaatagccacagaaaggtcacataaagacatgctaaatgtctaaaaaccatatcttaaagcacttgcccctgctacaaatctttttgtaacaggggcaagtttcattatagggactctccgtccctcatattcttattcatcaaggaatcattccttctctcacaatatccaccagaatcggcttcaatccgctaacgaaacattccactgcaatcaccatcaaaatcagtcccataagacgcatcatcacattattacccgtttcacccaagacttttaccaatttcgtggaagcacgaagaataaagaaagtcagcagataaatcagggcgatagtaccgatcaatatccccttcatttcataagaatgcgcatcctgcatcaaaacgattgcattggcaatcgctccgggaccgcataacataggaataccgagaggagtaatagagatatcatccgcatacgttttgatttcttcgtccttcaacttcatcggtgtatagcgggcttgaagcatatcaaagcctatcttgaagataatcaccccaccggcaatacggaaaccattggtagagataccgaagaacttgaaaagaaactgcccggcaaagacaaataccatcaatgtaataaacgacacaatagtagcacgacgtacgatagactgacgttctttatccgtcataccatgagtcatggtaagaaagacaggcatcgttcccaacgggttggtcaacgtgaagaatgaagtgaaacaaagtaaggcgaaaggcagaagcgtactatccatgattatatcgtattttatgcaaaactaaaacgcaacaaaaatacgacttaatccagaaaacctataataaatccattaattctttcaaggaatggatgtgataagtagggaggaaagggaaagctgtccgttctgtcacattgtagaaaacctgatgcatccctactccgtgcgctccggttatatccgcttcccaactatcaccaatcattaaggattcgcgcaactcggattgagtagcagacaaagcaaaattgaatatctccggccaaggcttcagcactccgagatcttccgagagaatcacctttctgaaatacccgtccactcctgccgaacgcatcttacgtgattgcaattcacgaaacccattggaaaggatatagaggttatatttgggagcaagatactccaatacctcctttgcatgaggcattaaaacacttttagtagggataatagcgaaaaaatctctcgaaaaccgttcagcgagcgcttcatctttcactcccacggcctgtaaaggataaaagaaacgttggctgttcaattcatccttcgttatctttccttcaccgtactcaacccagagttcggtatttctttgttgataaagagtataataatgattgaatgaatcaaaatagcggtcgaacgaatatttctgatatacttcctcaaaggtgttacgagcattttgagaaaaagcccagatggtatcatcaagatcaaaaaaaagatttttatatttcatcagtagttatataataagaaacaaaaaagccaatgtgctaatttcttgaatccaggaatcagcacattggcaattcaaaaagggatgtctaccttattttacctggataaccaagtatctggatacactccagaattcagtaggattagtaatcttcaatgtcaactggcctttgtcatctttaaccaattcataagaaccggacggatgagtagtcagtaactcagcacgtttagagtacaacttgatttctttggttgtacggatatcgatttgagtgaaataatccttattgaaatcagcgctcttcaatacgtctccgctctgaagaatcttttgagctttcaattcagattttgtaccgaatacgaaccaggcagcattcaggctcttttcctgttcagcaacggttttagctttcgcttcgttttctgcagccaacgtttctttagcagcagacaagtcgctgacagcagcatccaattcctggatacggatattcttggaagccagttctgtttgaagttcttcgatacgttgttgtttagcgttcaattcagcagtcaaagcggcaacagcttttttcatctgtgcagaattgtaattgctgttcttcaactgtgcctgcaactttgcaatctgcgctttgttttcttccatctgtttagagatgaattcgatgtcagaagcaatctgttgcttggcgctggcagagttttcagtgatggttccacgttgcaagtcaacacggctttcggcagcattgatcttacggaaaccttcctgaacttcattgaaagtacccatcatatcatccagttcagcattgcgctggttcagttccatcaaaagagaatcattttcagctttcaggtctttacttccacctttaaagctatcacacgaagctaacatggctacgcatacaaataaaacagctaactttttcatacgtttacgttttacgttttttaatgaaattatttaatcatctattcctgctaatactatcacaatctcgccccggggttcggtagcggtaaagtgttctatcaattcagccaaactgccccgaactgtttcttcgtggagcttggatatttcacgcgacacggttgcctgacgttcagcaccgaaatattcggcaaactgtgttaacgtcttcaacagacggtggggtgattcataaaacaccatcgtacggtgttcttccgccaatgtcttcagtcgtgtctgccgtcctttcttctgggggagaaacccctcgaagcagaacttctcgttcggcaatcccgatgcaacgagtgccggaacaaaagcggttgctcccggcaagcactgcacttcaatgccgttgcgtacacactcacgaacaaccagaaatccgggatcggaaattccaggcgttccggcatccgaaattagtgccaccgtttcacctgcctttattctattaacaacactttccaccgttttatgttcattaaatttgtggtgggattgcattgcattctttatttcaaagtgtttcagcaaaataccggaagtacgtgtatcctccgccaaaatcagatcgacctctttcaggactttgatagcccgaaaagtcatgtcctccagattccctaccggcgtaggcactacatatagctttcccatcttgtttttgttttatactgattgattaaaatatttctttagtagctccagaaagtcgttcaccgcctccttttcttcattcaattcgactttcgaggacagaaatgcgactgcagtcttgtaggaactcattactgatatctgttcgataacccgattcatcaaatcagtgttgcctccgaacagttcacgagaaaaacggaaagaatcattcaagctgatagcatgtcgcaagccggcagacagtttgagactttctcccaacacagccgatttaggttcttcctctttcacaacagtttcaacgacaggttcctcaacaattgccggttcctcttttttcccttcttcttcttcttcttcttcttcttctgctgctgctgctgctgctgctgcttctgcttcttcttcttcttcttctgctgctgtctctgcagctgccgctattacgacaggtttctcttccgcaacaatggcttctccttcctcatcttctttcacaacaaccgattcgagagattgtataatcacgggggaatcctcttcagacccggcaacttcatcctcctcttccgctgtctcttccacagctgacggagaaattacctgaacagcatccacctcctgctgcagttcttccaaacgcccctgcatccgtgtaatgctccgcttcaacagttcagacaaagtcggagtcggctccttggtaaatgaatccatgagatacttcaactcatgaacatccaactcaatatctgttaatagcttctgtttcatgtcagtccattgtttatacggtgcgaatgtaggaataatttatgcaataacttaaaataatggataatttaacagttcttgcacattgaattgcttacctttgtccacatatttatttaatcaagaaaacacaaaatctcatggtattattttcagaagaccacatacaggagactagaagaagaggccggatcgaagtaatctgcggttctatgttctccggaaagacagaggaattgattcgcagaatgaagagagcgaaattcgcgaaacaacgtgtcgagatattcaaacctgctatcgacacccgttattcagaagaagacgtagtctctcacgacagccattctatcgcctccactcccatcgattcgtcagccagcattttactgtttacttctgagatagatgtagtaggtattgatgaagcacagttcttcgacagtggtttgattgatgtatgcaaccagcttgccaacaatggaatccgtgttatcattgcaggattggatatggacttcaaaggaaatccgttcggacctatgccacaattgtgcgccattgccgatgaagtctccaaagttcatgcgatctgtgtgaaatgtggtcagctggcctctttctcacatcgtacagtcaagaatgagaaacaggttcttttaggcgaaacagccgaatatgagcctctgtgcagggaatgttatctccgtgcacgaggggaagatgagcagaaagtataaactctataaaagaaacagattatggaaaggaaaaagataacattcgacagttttatacgcggttccatcggatgtgtgttagttgtaggaatattaatgctcgtggaacgtcttagcggagtgttattacctttctttattgcgtggctgatagcttatatggtctatccgttagtcaaattcttccagtataagctacgattaaaaagccgcattatttccatcttctgttccttattcctcattacggttatcggagtcactttattctacctattagtgccgccgatgatttcggaaataggcagaatgaacgacttgctagtgacttacctcaccaatggagccggtaacaatgtgcctaagaatctttctgaatttatccacgagaacattgatcttcaggcgttgaaccgtgtattaagtgaagagaatatcctggcggcaatcaaggataccgtccccagagtgtggactttgcttgcagaatctctcaacattctattcagcatccttgcctctttcattatattattatatgtaatctttatattattggattacgaagcgatagctgaaggatggttgcatctgctacccaataaataccgtacgtttgcctccaacctggttcacgacgtacaggatggtatgaacagatatttccgtggacaggctttggttgctttctgcgtaggtattcttttcagcatcggtttcctgattatcgatttccccatggctatcgctctgggacttttcatcggagcattgaatatggttccctacttgcaaatcattggtttccttcccaccattttattggcaatcctcaaagctgccgacaccggacagaacttctggattatcattgcatgtgcattagccgtctttgcaatcgtacaaatcatacaggataccttccttgtccccaaaatcatgggaaagattaccggactgaatcctgccatcatccttttatctctttctatctggggttcattaatgggaatgctcggcatgattatcgccttgccactaacaactttgatgctctcctactaccaacgctttattatcaacaaagaaaaaataaaatatgatgaagtagaaactactgataatcaagaaacaagccacaacgaggaaaaataattgaaacttttttctacgtaatgcttgcaaattaaataaaagtaactacctttgcacctgcaatcaggaaataactgattcgcaaataaggattgattcgctagctcagcaggtagagcacaacacttttaatgttggggtcctgggttcgagccccaggcggatcaccaaaaacaagattaagcctctgattttcaggggcttttcttcttatccaaaggccttattcccattctactctccattaaatatgaacaacagaaaaaattatatagtctacctacaacaatcagccatgaagcaggaatgtcaagacccgaagtagaggtacaaaaaaaaattatacagacttactcgacagacagaaactgattactgaagataaccattcctcagccaataaaaagaaaagcaatacacgccacaacttattttgcacaacttgtttggaaaataaaatattttttccttacctttgtattaggatttatttcaaatcttaataaaaatagagcgttaaggcattatccaagttcaggaaatccccaatttcaagacaacaactggataatacattggacgctccacgtactatttatatattaaagtgttatatatataggcgtggggctttgtgtattatatgttgttgagtatggggatacttctgaacggtaataccaaagttcccacgcttaactttatatataaacacagctccagggaacagagttgactagaagataaacattatgaaagcaacttgttctaaaagtaagacgactgtctcgaccggtttctgttcttcgtttgttactgtctttagtgaaattcttattctgtttatttccattcctgtttttttcaagacacacaatcactatcttacaaattacatgccaacatatttttctgagaccttcctccatgatagccaataatagcggttcctctcaccatacagaaaaagacctttggttacaagttctcgctttggcaaaggaaatacaggactgtaagtcttatctgtatcctaagaccttggaatctatatatgataatattgtaagaatagaaaaattgttggatattttattgattatcactcgtggaagtgacaaatagacattattattccgccttatgcgacaatttgtccaatgcagtaaaaatgtcgcatcattaaactatcgttaaaagtttcatttttatagattacctctatgaaatggaatttttatataccaagaaacgtacgcaatcagttatgtaaccttaatgttcagaataatgatagataaacgaatagaaagtaccatgaatgaattgatcaacgcagaaatatggtcaaccaacttatacctgtctttacaggtttattttgaaagtgaacaactcccgatactgagctcctggctaaatacccaggctcaggataatatgaacaaagtctatcaaatgatgagctggatatatcataatggaggatgcgttgcaattaatgagataaaacgggatgtgcaaaatggcaagctccagtaagtgccttaaacgaattgattgaacatgaacgatatatgtcccgcctagtctccatactcctcatactatgccgaaacgtggatgcgtcctctaattctttcatcaacaggctgtattcagaccgaatatatctaagtacggcccttttggaattattacgtattcttgcccaagaaaatgtgcggagactaccttatttctaacagtatgtccctccatttaacatctcataatattaaagattatataaccttgtatggtctactttttgcaacataataaacaataataaaatagatcatgaatattttattaataggataacccggttttatcgacattttgggacaagtttatgcttgtttcaagataagagagaatattaaattattattaactctaaaaatttaaatcattatgagtgagaaattacaaaatgctttgaatgaacaaatcacagcagaattatggtctgccaacttgtatctgtctatgtctttctatctaaaaaaagaaggtttttcaggtatggccaactggatgcggaaacaatctgcaaaagaagtgggacatgcgtgcaccattgccgagtatatggttaaacgtgaggcgacaccgaaagtagacaaagtggatgtagttccacaaggatggggaaattctttggaagtttttgaacatgccttggaacatgaaaagcatatctccaagttgattgacgaattggtatacttagcttcagaagaaaaggataatgccacacaggattttctgtggaaatttgtccgggaacaagtagaggaagaagccggtgtacagaatattgtaaacctgttaaagaaagccggagatagtggtatccttttcatagatgctaaattggatggatgcaaataataaacctgaatagttaaaagataaatgatatgagcaaaacagtagatatattaggtgggcaggctgaatactacctaaaccatacatgcaagacaatagataaacaactgattcatattccgggtccggatatagtagataaggtatggataaattcggacagaaacattcggacattggagagtttgcaaactttatatggacatggacgtttagcgaataccggctatgtatccatcctacctgtagaccagggtatagagcattctgctggggcatctttcgctcccaatccactttattttgatccggagaacatcgtaaaattggctattgaaggaggatgtaatgccgtagcatctacattcggcgtattaggcgccgtagcacggaaatacgcccataaaattccattcatcgtcaaattgaatcataacgaactgcttacttatccgaatagctatgaccaagtaatgttcggtacaataaaagaagcatggaatatgggcgccatagcagttggagccactatttatttcggttcggagcaaagtcgccgccaaatagtggaagtatcgcaagcttttgaatatgctcatgaactgggaatggctaccattttatggtgttatttgagaaacagcggttttaagaaagacggaaccgactatcacgctgcagccgacctgacaggccaagccaaccatatcggagtaacgatcaaggctgacatcgtaaaacaaaaacttccgtccaataatggtggcttcaaagccatcggcttcggaaaaacaaatgagcgcatgtatacagagctgacaactgaccacccgatagacctttgccgttatcaggtagctaacggctatatgggacgcgtcggactaatcaactcgggtggtgaatctcatggagaatccgacctgcatgatgctgttgttacagcagtagtgaacaaacgtgctggcggtatggggttgattagtggtcggaaagccttccaaaaaccaatgaaagatggggtccagctattgagcaccatacaggatgtatatttggattcttcaataaccattgcataaagacaggtcgtccatgaaaagaatagtattattacgtcatggtgagagcctatggaaccaagaaaaccgcttcaccgggtggacagatgttgatttaagtgaaaaaggcgttgtagaagcctgcaaagcaggcgatacattacgagaagccggattttcttttgagattgcctacacttcttacttaaaacgtgctataaaaacgctggactacgttctggaccgcctgaatgagagctggattcccgtcgaaaagacatggaggttgaatgagaaacattacggcatacttcagggacttaacaaaagtgagacggctgcccaatatggtgaagaacaagtacacacctggcggagaagttatgatatagctcctgcagcattgggagaggacgattcgcgcaatccgagtaaagacatacgttatgcagatgtcccggatatggaacttccacgtacggaatccttgaaagatgccattgagcgtgtaatgccttattggaaatgcatcatctttcccacattgacatgtaaggataacctgctggtagttgcccatggcaacagcctgcgtggaatcatcaagcatctcaaggaaatatccgatacagacatttccaacctgaacctgcctacagcagttccttacgtttttgaattcgacaaccggctggctcttgtcaaagactattttctcggtgatccggaagagatacgtaaacggacggaagctgtagcaaaacaaggaatgactaaacaataaaagttctgtcaagcagccagacatattttctaaactttaattattaactaaaaaaggaggtaaaaatggtacctacaaaaatgaaccagaattggttaccaagtatttttaatgatttctttaacaatgagtggatgatgaaggcaaatgcaacagcccccgctattaatgtaattgaaaatgaaaaggactataaaatccaattggcagctccgggaatgacaaaaaatgacttcaccgttaatgtggatgaaaacaacaatctagtaatctgcatggaaaagaaggaagagaagaatgaggagaaaaaagacaaaaaatacctacgccgtgaattctcttattccaaattccaacaaagtatcatactgccggacaatgttgaaaaagataagattacagccaaggtagaacatgggattctgtctatagatattcccaaaacagtggacaaagaagttcagaagataaccagaactattgatatcaaataagatatcttagctaaactttacccaaggcgttccttatatttagggggatgccttgatataaacctttgaacctcaaatcactataatgaaaacattcaattttgatgaagcattaatagctctgcaaagtgatctgctaggttttgcatataaattgacagctgacaaacacgatgctgaggatttattgcaggaaacaatgttgaaagctctggataataaggataaatttgatcctggaacaaattttaaaggctggatgtatatcattatgcgtaacgcttttataaataactaccggataaaaaaaagccagggagacttatatatattatccgaacccgactatcatttcctgctaagagatgactcttttgctttcatagacaatagtcaagatgccaaggagataagggcagcccttaaaacactacctaaagaacattacaacgcttttatgttgtatatatccggattcaaatatcgggaaatagctcaagaaacaggagtgtcgctaggtacaataaaaagccgtatctttcatagtaggaaaaaattaaagcagttactttctgattttgtctaataattgtataaaaatgaattatgaataacaagtatattggaatcctgacttccggaggggatgcgtcaggaatgaatgcagcgatccgcgccgtaacccgtaccgccatcttcaacggctttaaaataaagggaatttataggggatacgaaggactgattgccggtgaagtaaaggaactcacaacagaagacgtgagcagtattattcaaaggggaggtactatactgaaaacagcgcgttccgaagcttttaccactccggaaggacgtaagaaagcctatgaagttatacaaaaagaaaatatcagtgcactgattattatcggtggagacggttctctgacgggagcccgtatctttgccgaagagtataacgtgacatgtataggactacccggtacgattgacaatgatttatatggtactgatttcaccataggatacgacacggcattaaatacaattgttgaatgtgtagataaaataagagacaccgcaacctcacacgaccgcattttctttgtcgaggtgatgggacgtgatgcgggcttcctggcccagaacagtgcgattgcttcaggggctgaagctgccattattccggaggacaaaacggatgtggaccagctggagacatttatcggacgtggattcagaaaaacaaaaaacagcagtatcgtcattgtgaccgaaagtccccaaaataaaaatggaggtgccatgtactatgccgaccgggtaaaaaaggaatatcctgaatatgatgtaagagtttccattctgggacatctgcaacgcggtggggctccaagtgccaacgaccgtatactggcaagccgattaggagaagcagccatccaggctctgatggaagaccaacagaatgtgatgataggcatacggaacaatgaaattgtctatgttccttttgcacaagcaatcaaaaatgacaagcctattgacaaaagcctgattcgggtacttaacgagctgtccatataaagttattaattcaccactgcttggaaagacactccgggaggcagacataccggactgtatcatcatcgggaaactacaaagttttatccggtatggataatgccctattataaaataaacaaggaaatataaactatttaatgtacaatgttatggaatatccaagttataatgtaaacactcctcaatggagggaaattacagtcggttcacatcttcccatggaattgggaaaacttgcggaaatagcacgtaatctatggtggacatggaatgatgacgccaaaagtatgtattgcgacctagatccggagctttgggaagaaacggagcaaaatccgatattgttcctggagcggatgaattatgagaagctggtaacactggcacatgatgagttttttatccgcaagatgaataccgtctatactgctttcaaggaatacattaatgtagttccagatcataaacgtccgtcagtagcctatttcagtatggaatacggcttagacaaggtcctcaaaatatattccggtggtcttggaatacttgcgggcgattacctgaaagaggcatcagacagcaacgttgacctttgtgccgtaggactgttgtaccgttatggctactttgaccagtctctttccatggacgggcagcagattgccaattatgaagcacagaatttcggacagctcccaatcgaaaaagtgatgcaaccagatggaaaacagctggtaatccacattccctacgccgacagctttattgtacatgccaatgtctggagagtcaatgtaggaagaatccccctttatctactggacacggacaatgaactcaatagcgagtttgaccgtccaattacccaccatctgtatggcggtgactgggagaaccggctgaaacaggagattttactcggtataggcggcatgatgacactgaaagctttgggtatagaaaaagacgtatatcactgcaatgaaggccatgccgcattaatcaacattcagcggttatgtgattatatagccggtggtctggatttcggccaagcgatggaattagtacgcgcttcttctctttataccgtacatacacctgtacccgccggccatgattattttgacgagggacttttcaacaaatacatgaaagggtatcccgacaaactgggcataacctggaataacctgatggatctcggacgccataatccgggagacaaaggagaacgtttctgtatgtctgtattcgcctgtaaaaccagccaggaagtaaacggagtcagcctgttgcataaaactgtgtcacaggaaatgttcgctcctatctggaaaggctacttcccggaagagaatcatgtgggctatgtgactaatggcgtacatttccctacttggtgcgccaccgaatgggaaaagcttttcaaagacaattttgatgagagctttattcatgaccagtccaatcaaaaaatctgggaagctgtctacgacattccggacgaagaaatatggaatacccgcctgaaactaaaaaccaaactgatagattatatcaaaagaaaatgcagcaaagactggcttagaagccagatcgatccgtcattaaccatttccatttttgagaagtttaacccgaatgcccttctgattggtttcggacgacgttttgctacatataaaagggcgcatcttttgtttaccgatatcgaccgcctggctaaaatagtgaacaatccgaaatatccggtacaattcatctttacagggaaggctcatcccagtgacggtgccggccagggactaatcaggcagattgtggaaatatcccggcgtcctgaattcctaggtaaaatcatatttcttgaaaactatgatatggatctggcaagacatcttatcgcaggggtggatatctggctgaacactcccacacgtctggccgaagcctcaggcacatcaggggaaaaggcactgatgaacggtgtacttaatttctcagtgttggatggttggtggtatgaaggctattgtaaggatgcaggatgggcgctgaccgacaaaagtatctaccagaatgaacaatatcagaaccagctggacgccgaagcaatttactatctattggagcatgacattcttcctgcatattatgaacatggagataaggagtattcggaaaactggattaagtacatcaagaattcaatcgcacaaatagctccccgttttaccatgaaaaggcaactggacgattactatgagaaattctatatcaaactgtcggagcatttccacattctctctgctgacaataatgcaaaagccaaaatgatatctgactggaaaaccgctgtccgaaacaggtgggattccattgaaatcaaatccataaaagccggaaacgggttggatgcgacaatcgaagccggaaaggaatatgaagtaacagttgttgtcgatgagaaaggtctggatgatgcaattggaattgaattggtcattattcagcatgaaagtggtcaagatcatatctatgaagtcatacctcttccactagtttccaaagacgggaatctatataccttcaaggggacatctcaaatttttaatgccggaagtttcaaacaggctttccgcatgtatcccaaaaataatctattaccacatagacaagatttttgttacgtccgatggttttaaaaaaaagggaggtgtgtcataatgaataataaaacgcaaattatcgcagaaataatttcataaatcgttgattaatatataaatataattgaaataatctgcgataatttgcgttaatctgcgttttgacacactccgcttttatacatgacaagtttcaaaggttattcaataaaagataaagaacaatgaaaccgaacattattcttatgaatttcactcatgtctatgagcaggaaagatttataaacgacatccatttccagtggatagattgtaccgacctaaacggaaccaactgctactgtgatgcagaagcagccaaagtcattagacaaagaatggccccctacttacctgaaggaatacatttcattgattccggtaactatcattatatcagtaaattttggacggataaaataaagaccccattctcactagttgtctttgatcatcatccagatatgcaaccttccttatttgacaatctaatgtcatgcggatgttgggtgaaaaaagtattggatacaaatccttatcttcaaaaagtatgtatcgtcggtgctgctgaaaagttgatcaaagcactgcatcccaattatggagaaaaattaaagttttatagcgaaacagaactttctcacgaagaaggatggaacagattctctcatgaacatctgaatgagcctgtctatatatcagtggacaaagatgtattggacataaaatcagcagtaaccaattgggatcagggttccctatcactgaccgaattggagaaactcctctccatcattctaaaaaaagaagaaattatcggagtagatatctgcggtgaatgttccagttctttggatgttttccaaaaaaacagagaactttcaattaacagtaaggccaataaggaactattaaatctattcctgtccaatcaaaacgagattcatcccctataagtaaatcattaacatagtcatgaatattatgcttagcacaataattagtgaattgaccgtacatgataattccacatctctttacacttttctaattctccatctcttgatattgctattttcaatagaaggttgtacttttgtcatcattttatcagtcaatcttttatacaaatggtctttatacacaatttattacttattctgggacgtggaataggacaagtgatgtttcagaataatgcgttatccggattattcatgctaattggaatatttctaaactcatggcaaatgggaatactagcagtctgcggtaatataataagtacactgacagcccatttttcgggatataagtatgatgatattaaaaatggattatacggatttaatggaactttagtaggtatagcagttggcgtatttctacaattatcggtaggaagtttaatcatgttgattatcgcttcggccctttccacatggattgcctatttttttaatcagcaacgtttaattcctggctttactgctcctttcattcttgctgtatggggaatgttgggagtttgcagctggcttataccagatttactatcagtttcctatacggttattgataccacacagaatattaattatttccaagccttctgcttaggtatagggcaagtcatgtttcagggaaatacaattctatccggattatgtttccttataggcattttgattaattctcgaaaggcaagtctctatactatcttgggagcacttcttcctattcccctagccattttacttgaagtggatgctacagacttaaatgccggattaatgggctataatggggtattatgtgcaatagctttaggaggaacgggctgggaaagtggcgtatgggcaggatgctctgtcttactgtccaccgtattacagattctaggaatgagtttgggtatcactaccttaaccgctccctttgttatatctgtatggatcatactaatgatacaaaaagtaataagaacgcagaataactaaattagtcttcaaataaaagtttgtgatattttttttcaaagaaaaagataaaagatatcatcttgtcacccgaaatatttgcttttgtattatgaatactacaccataatgcagtaaacttaaaaatagcatccaaactccttgaattaaaaagagtttggatacctcaacatttacagtaaaaaatattatttataaagtctcaatcagatcttagttatgcttacaacataaaggtgataactacccatataaacaacagacagaagtgtatcacataattatgataacatcatctcatatcttttcacccacaatcagcaacagtttttcattttcccctcttaaaaactttatttcttctttcaaccaatctatttccttgttttttgaggaaatcaattcagctatcattgtatcaggaatataactactactgataaaattcaatatcttggagatatttatttcttctctttttttaaagtttcaaattgttccttttgtttatccaacagcttttcgaaaatctcaattacctgttcaacaggaaaactattaaaggtctgattattgcctgtattactgacagcacttttaacaccacaattctcgtagaagttattcgtattatacaggattgtctcttcattaaaactcttcagcccatctacagtaacgcctagtgctgaagcaatctcacctaaccgttcatcgtcaaacttctctgtttgttctattttcgaaacagcctgtttcgttatacctaacaaatcaccgagttccgcttgagtcattccccgaagccgacgcacccgttcaatttttcttcccagatgaattgtatttgtgtacttttccgtttccatattccagtctgttgattattttccctgctttatgcactctcttagaatctctattttctcttgttcacttttcaacaagcgttcatacagttcaaccaccttttcaataggattaatctgttggttatgagcataaacagtagcaattgctcccggagaaatggtagcatctttataattattaatattacaaatggctttttcaacatcaaaatccttgatgacatcagtagatattcccaagacttcagctatttttgtcaacagtccgtcttctatttcatcttgtttctctattttcgagatctcctgctgactaacacccagatcagaagccaacgcttcctgtttcatacccagatacacacggattctttgcagattgcgaccgacatgcctttgattcaccttgtcttttactttaatatccatatcattgttgctttagtaaatacattgagacaaagataatgaaaataaaattcgcaactacatatcgccctttgaaaaagacagctttctatctgtttctcttttaaatataacctaattagatctattttatcccagtctttatcattttatctacttctaaaactttactaccgtaaagtttacgacgggtaaaggtttaatcaacaacaatattactttataaaatcaaatatacaacaggtagtaagaaacaactcagttctgataaaagtcaactctatatttttcaatccccagttctatatgcataattttgccctgtcagtttttagctgacatgaatcgtggcgccacatttaaaacagtgcagaaggatgtgcaattgacattctgaacaatcatcattaaaccaataaaatctaatagcctatggggtaagtaaagtcgttacaatcgagacatagctttaaatcggccgaaaatttagctatccaaaaacaaattagtaaacatacaattaaacaaaaagcatgaaatcattttctgataaaacaaacatagggtggaataattccctaaagactgtttatagaatgaatttttacctattattcctattaataggttcattatcgatacttggatcaacacgggcttattgccaacagagcagaacgatctcgggtatagtgaaaaactctcaaggagagacgattatcggagcgaatatcgttgaaaaaggtaccagcaacgggacgattacgaatgtagacggactgttcacactgcacgtatcgcccaatgcaatattaaaggtatcttatatgggatacacggagcaggaagtcaatacacgcaacaagaacaagctggaaatcatactgacggaagatgccagactgattgatgaagtagtggtggtaggatacggatcggtcaaaaaacgggatttgacgggggcagtaacctccgtcaaaagtgcggaagtactggccgctcctaccaataatgtgatggaagcccttcaaggcaagatacccggaatggatatcaccaaaacttcgggacaggtaggaggtgatgtcactatcctgttacgtggttcacgatctatttatggcagcaacgaaccattgtttattatcgatggaatccccggcagctatagccaggtcagcccgtcggatattgagagtgtagatgtattgaaagatgcttcttccaccgccatttatggttctgcaggagcaaacggtgttgtcatcatcaccacaaaaagaggaaaagagggaaaagcgaccgtaaacttcgatgcttattacggattcagcggttcacctaactacaggcatggaatgacgcgggatgaatgggtcacctaccagcaagaagcctataaatataaaaacggtgactatcctaccgatatgtccgccctactggggaaacaggattttatagatgcatacaacgacggcaaatggatagactggatagatgaagtgtcgggcaacacggctaccacacagaaatacagtctttcggtcagcagtggcactgaaaagacaaaattatttgcttcgacttcctacaatcgggaagaaggtttacttaataacgaaaatctgaacagatattcgttacgcctcaacctggatcaacagatattttcatgggcaaaggtgggctttacctccaatttagtctaccgggacttgaactccggtgtgaaaaacacattcaccaaatctctctccgccatcccgctgggtgatgcttataccgaagaaggggagatcaatcacgaatacatcacgggacaatattccccgatgagtgatttcatagagaatcagtatgtagacaacacacgttccacctatctgaacatgagtggctatgtcgaactaactcccatcaaagacctgacttttaccagtcgtgtcaatggtactttgaatcactcacgccacgggcaatactggggagagaagtgcaatgccaaccgtccgtcttatgcaggttcaccgcatgcttccatcaccaacaacaatgcctggaattacacttgggagaatattctcgcttacaacacaaccatcgcaaaagaccataatctgggaggttcactgattacttcctggaataagaaccagtcggaaagtagcatggctgccgccagcggtcagatggtagatcaatggtctttctggcgactgacatcgggcacttcccaacatgtagaatccgacttcgcacagacgcagaaaatgtcttttgccttccgtctgaactattcatacaagggtaaatacctatttaacttctcgacccgttgggacggtgtttcacaattctccaccggacataaatgggatgctttccccgcaggcgcactggcgtggagaatatcggacgaagcatttatggaaaagacacgtagttggctggacaacctgaaattgagagtgagctacggcatcacgggtaactcgggaggaaccaccgcatacagcaccacaacacaagcatacgtatatgccgcttcgggaatttccattaatgggaagattgttcctttcacgcaatactccggtacctacggtagttccgatctcggctgggagaagtcatacaactggaatgtggggttggatttcggtatcctaaacggtcgcattgacggatcggtagaatggttcaagacaaccaccaaaggattattattcaaacgtacattgcccatcaccagcggtctgaccggatggggatcgcctctggctatctggcagaacatcgcccagaccagtaaccaaggcgtggaagcaacgatcacttcgcacaacatacggaataaagatttcacctgaataccactttatccgtcacctggaacaaggaacaaatagacgatctgcctgacggtgatctgatcgccgaaaacctgtttgtcggtgaaccgattaaagctatttacggatataaatataccggaatttggggaaccgatactccacaggaaacattggatgcctacggcgtaaaacccggattcatcaaggtagaaaccttagaccagaaaggcgatgaaggtgtgcataaatacagtacggaagaccggcaaattctaggacattccaatccggactggatcatcggactcagcaactccttcacctacaagaattttgatttatccgtctttgccatggcacgttacggacagacaatcaacagtgacctgctcggttattataccgccgaacagagcgtaaccaagaatcaactggcaggcgtagactactggacagaggataatcaaggagcctatttcccccgtcccggaacgggagacgaacaaaaaaccgtatatccttcattaagagtgcgcgacggctccttcattaagattaaaaatatcacgctgggatatacactacccgtcaatatttcccgcaaagttttaatggagaaatgccgtatttatgccacagcctacaatccgttcatctttgtaaaagataagcagttgaaagatactgatcccgaaaccaacggttcggatgcatttcctacctaccggcaatttgtttttggcgttaatttgacattctaacaaaagattataatcatgaaaaggatatatataaaattcatattttgcagtgtgctgttctcggccttatctctacattcctgcaccttggaggaatacaacccgggcgcatttaccaaagaggctttggctacttccatcgatggatatgaaaccctgattaaccagtgttattttgctatggaaaggttttactacggttctgcggactggatgtcactgactgaaggcgacaccgatctttggacgtataaagccaacgaatcaacaagttacacacagtggttctggtttttcgcaggaacatcacccaatacgacttacaccaataattggtggaacgggacatacgacggtgtgggagcctgtaacgaagctatcgcattaggagacaaacctccctacaccacggaagaggagcggaatgccaagattgcggaagcccgttttcttagagctgtctattatttcaatgcagtggaacaattcggagcagtgacgatgctcacagaaccgataacagcggaaacactgacttactcccccacccgcaccgatccgatgactatctatcaggaagtaatcctgcccgatttaagattcgcatccgaatggttgccaacaggtacgcatgcaactactaccaccccgacgaagaaagccgctctcggttttctggctaaagcctgcttgcagacgtacgaatatggaagcaccgaatatttgcaggaagctctggatacagccaagaaattgattaccgattgcgaaaccggcggtgggaaatacaatacgtatatgtatccatcgtatagcgaagtgtttaaagagagcaataactgggaaaacaaggaagctctctggaaacatcgctggtatgcaggagcagacggtcacggatcaagcaacggaaactacaagttgaaccgcaacgacgaatacttcttatgcaatatcaataaattcggtgcacgtgaagacaatcaggaaacacgtcttacttgggaaggctcaattaccggtatctttatgcccacacagcatttattgagtttatatgtacagaaagacggaacattggaccccagatttcatgaatcgttcactacagagtggaacgcgaacaagaattacacgtgggatgaaagtgccgtccacatgtatgacaaggaagaaaccgtcattggcaaagctctgaataaaggtgatttagccattaaattcatcatgccgcaggacatcgattatgcgacagagaaacaaaaagaacacatttctgattatttgctaattgattatcatcatgtatatagtgatgacaataataatgtgaacatgaattatgcttatacaaacgtcactggcaattacaaaaatgacggcacaaatgagaaccaattccgctactattatccatcactgaataagcataacagcagcaattattatgtagccaatgcttccaaacagagaaacggtaatctgaatgcaacgtttatcatgcgcatggcagaagtttatttgattgcggcagaagctgatatttacctgaatggtggtgcgaatgcagccggttatatcaacaaggttcgtgaacgtgccggagcaaatccgcttacagggagtattacagtacgagatatcttagacgaaagaggccgtgaactttgcggagaatattgccgcttctacgacttgaaacggacaggaatgtttaagaactcggagtatctggagaatactcatccggacttagcacaattctttcacccgaattatgcattacgtcccatttcaactacatttactgcaacaatcaccaatggcagcgagtatcaaaatccgggatattaagtaggaatttcaatatgtacaggtattatggaatcaatcttggcacctgtacattaattatatattaagaaatgctccctatctcgttttgagatggggaacatacttttcaaatatgagaaaaacaagatatagattaattatatcgaaaactgtttgctagtcagaataaagtctctacctttacaaaggataaccatgtcacttattagtggctatttaaaaccgcttatgcctgttgaaaatgaaaacagctatcatatattattcaaaacatggaactaccgagcgagtaacacaccttatcggagaaaagttgactaataaagttgactacatctcattaaaagagtgtccgagacctgatattcgaacttacgatcgaataattctcggaacagccatttatgcgggctctccaaaccgaaaaattactcaattctgtcacaataatcaactgttattagagcaaaaagtaatagggttattcatctgttgtatgaacgaagagcaagaagcggaagaaatgaataaggctttcccggagttcttgcagagattatcgattcccaaagccattttaggtggcgagtttcagtttgacaaaatgaatttcatcgaaagatttttgacgaagaaaatagcgaaagtaaattcttccgtttcgaagctgagatatgatgctataaatgagtttacaagtcagataaaagataatcatttatggtaacttcttgagttatctattgagcaactttgtattcaaataataaatagaatggccgtataagaaaacttctttcaaaagaagttttcttatctatttaagacaatacctataatcgcaatcttttacttttacgaatccattacttaacaatgttcttatggataaaacattagcctcatcagggtcagccaatatctctttccctcctatttcggcaatttccccgatcagcttctttacaataatcttcccgatgcccttacccaaatattcctcttcgcctatgagataacctatttcaaagactgtccctttctcatcgacagtttttccgtaatgttccggtatatattctttttcaaaaaaacaatccaaatacaaacaaaagccaatggctttatcattataataaacaatgaaatgtttcatataatgatattgggtatttctattatttacctcatccaaccaagccattttatgttcttctccgtcagggcaaaaccatttataaatatattctttagccaaccatttactgaaaatgtctacatccttatcacgcaaaggctttattgtgatcttatcattcttaatatccatactttttgtggtgagacgccagcctcttttataaactccataaatccaactatttgaaatacaaagatataattttcaatacaataaagaagaactaaaggatatttataaagcaactcatgcccacaggtatcacaacaagaaaacgaatgaccaattataaagaatctaaaacaaacacaaatgtcgaaatcatacgttgggaatcgtacataattgcttatatttgcgttgttgagcaatttattaagaaccggatgatatgttgaaacggattaaatttcaaattctgtagaaatgtacatcccaataaaatactaaaaaggcaagaacatgaaactttggaaatatagtggaacacttttaacagcaacaggagtcattcataccatttatgcgttatttcttggaaaagaagcttttacggaaatgcttaacaatggattaatagactctattggagaaaatcataacctgggctttgctttctggttcctaatctgcggaataatacttattctttggggagagacacttcaatactatatcagaaaagaacaaaaaccggcacctttatttttaggttacttcattctactgttcaccataatcggttgcatagtcgaaccaatatccggtttctggcttttcttaccgcaagcacttattattatttattcaaacatgaaaaagcagtgagaagcatcatccatagcgaactcaaaaccgagtgcagtgcttaaatgcaacttattaaaatcccatagcatctttcactaaaaccatttctttatgagaggtcaacttctctaataaaagcaatgcaaccccgtatgatgtttgaggacaataagaagttatgatattatcatccaccacgatgggagaatttacgatagttgctccaaatccctgaagcactttctgtttatgagcacctctaagatgataagttgttgctttccgaccgttcaacactccacttttcccaacaggcaaagctcccacgcagactgttgcgatccatttcttttgtgagtcaaacagtcgtatcaattccagaagttgttcattatatgcctcctcatagaatccgaattcttcaaatccgccgggtatcgcaagcgcgtcatatccatctgcagacacttcatccatgactttatccaccaaaacaggaacattgaaagaactaatcactttttgattcaaaccacaggtcacaacatctattttacaatcaaaatccgtctttgcccatcccataacatctataaaagcactaaactcaatcgtttcaaaccctttagcaaggaataccaataatttcataatcaaattagttatatattaataatataagaaacagcattgccctaaaaaaaacatgagctaaaatcaccttcattcttccctataatcccctctttacctcaccttttgcagcctcccaaccaatcattgcagtcttgcgaatctctccccaatggtaatttcccaactcaccggaagcacgaatgacccgatgacacggaataaggaaagctacgggattctcaccgacagccgttccaacagcccggcaagctctcggattattgattcctacggctatatctccgtaagtagtcaagccaccgacaggaattttcagtaaggtttcccatacctttagttgaaagtcagtacctttcagatgcaattttatttctttgagtttactccagtcctgcgtgaagataaataaagcattttgctgcacttcatccacaatcgaggtaaactttgcattaggaaacttcttccgtaaagagttaaaagccgcgtcatgatcgtctgcaaactccatacaacaaatacctttatcggtagacgcaatgaagatttcaccgaaaggacttttggcaaaactataattgatagaaagactttcacctccgtttttatattcgcccggcgtcatcccttctatatttacaaacaagtcatacaatctgcccgtaccggaaagccctgtttcctgtgccgcatcgaataaagacgcatgagtttcattcaagattctcttggcatattcaatactagtatattgcaagaacttcttagggctaattcccgcccactccgtaaacatacgttggaaatgcgctgtactcaacgccacctccccggcaatctcatccaatccaggttgccttttaaaattctcccttatatacccgattgcctgcgcaatacgtgcatagtcaagcgttttttgctcattcataacagaggtttgccatttaattccaaatccagcaaccgctttttggcaggcaatccgcctccatacccaacaagcgtgcggttactaccgatgacacgatggcacggagcaaaaatagaaatagcgttcgccccattagcggcagcaacagcacggacagctttcggcaaatcgagttgttttgccagctcaccgtatgacacagtcgaaccgtatggaatctccaacaacttataccatacactcttctgaaactccgtaccaacaaaaagcaaaggcacctcaaacacagtccgctcgccattgaaatattcatctaactggctcatcgcctcctgtatcacatctgacgtactttcctcataaccagctttcagcactttccgcaatctcctgtctacgatatccctatgactttcagccgcccagtcacaaagacaaagcttatcctccagcgagccaagcatcaaatcaccacaaggagaatgataacgctgtatcttaatcacattcgttttatcttccatacttccaaagatacgtttattatatttacagttgaaataacagctaataatattttcgtttttatactcgcactcttatttccaatgccgcaaaattactacacgcatcactgataaacgacccgaaatttgctattcttacatagaaaagacaatctcccctcccactcctccatacaatcaatcgttctcaatatactttattacccggcaaggactgccgatcgccacacaattcttaggaacagcattggccttcatactcgtacaaagtgatataaagcagaaagtgggaaaacctatccctcaattcaatctccaattattttttatacatgatttactctcacaccctcacactttccctgcattcccctattcatcgtcctttcagtaatgagggtaagagtgagggtaggtgagggtaaaaagttaccctcaccctgtctcgtcctgattttggttgacaaagccccctttcacaccacctttatcaattactctactttcatcaaatgataaagcgtccctttacgagacttacggcaaggaatattcagtttttgaagtgcacgcccaaactgtcctaccttattaatagccagtttatcccgtgttttcgtctgtaaataattcaaaatctgcatggcagtcagccattcgccttccatttcctcttctacgggattaagatagcagtggaacagctgttccagcggactcacctgttcaaactcacggttagtctgttttaatatgttttcatcctcatcattcaaccaataacgttcccctttataaatcgcctccattgcttgagcatacagctgtttgtaattgatggtaacgttcgtttgaataggagccgtcacctcgatgcaaataaaacggcggctaccgctaggatcggtaagcaaatctttctgattgctggtaccgataaaagaagcataacgcctcatttcccgaatcgtattaccgtatggtttgcgcagattcgccacaggcttctgcaacaaatgcttcaagaacccctgctgactgacattaatctgatcgaactcatcaatattgatcagaaaaaaacgtcccaaatagcgttccgcctcctgtttacttttaaaatcaatactgtccgtatagccgaaacgcaactccggcggcagaataatacgacagaatgttgacttgcgatacccctgcgaaccgaccaataaaggcgaagtattattaccatgttgccgatcaactcccctccaatgcgccaccatactaagaaaccagcggtaaaataattcctgccaatgcggattatcacaaggcaccagaccagccaatgcacggatacgatccttcccgtcccagcgacctgtctcataaagatattcctccacaggattatacaaaggaacacattccgaattcagaaaacgatccacatcacggtcccacgcactgatgccttccttcaaagcattgatcgcaatactgttgcgcacccgtttatccaccggcttaaagcaaaagtgaacagaatcgcgctgccgatattccaaatcgtcctgcaccgtattgtaacggaattcataccgacgtttcataaactcttccaacagaaaagccgtctcctgctctttactgatactgcttttcttgccgaatcccttacattcctgataaagattatgcaatatcgaacggatcacctgctcttcttcttcgcgataataatgaatcatcgtctgccgtatcgcttcctcttcgggaagccccgctttgaaacaatgctcggcaaggcgaaccaataaaggctgcaagtcgtccccacgtttccaatcctccatttcctgaagtgccctgttcaaggccgcttcataaatcttcgtgaatgtttgcgccgactcatatcccggctgcaaccgtaataacggatttttctctcccagtttccgctgacggaaagtctcttctcccggcatcataagcggttgttccaagcagaacggcaccgcatccggattataataaggagattcgtccagcgtcatacggcatctctgtgccaaaaccggttctttcaagtcaatatcgaaaggcaacatcggctgataacatttcacagccagccaataagcatgaacatgaaataattccgcctccgcttccttgaccggcaaccctccgtcatccggcaaagcgaaacgcacccatattttcacgctacgcccgctggagccacaaaaagcggcaaaagtctgtggcagaagtgccgcttgccgtttcacaaactccgcttccgagccaccggccaaccggctcacttccaactgtaccaaaccgttgtactgcttcattttccgttcgccctctttggtacgggtatattccacagcagaataaatgtatggcaatttatcaatatgttcgtatcgggcatacgtaccttccagcaacggtataatctcccgcaaagccgtgatatgtcccgctttggtttccgtcttcattttgtcgaatagtgtgcctgtctcacaaatactaagagtttcttttccgctcccgttgtcttgtctgattaaagtaactttcatcctatttttgtctattttttctacaatcacatctacatatttaattcctgtaaagatacgcttttatcctccggtaaacaagcattttatccgataaatacctgcatattatttgcatttgccttattatttatgtatctttgcttagtagttgtcaagggctcacccgtgtgaacaaacaggctatcaattgtaaataaaaacgtctacagacgtaaatagccttgttcacatgggtgagcccttgcaaagcattagagcttaacaaaagaaacattaagcattaatgtattactatctaagagaatacataacaagaagagttcatttaaaacaaatatagagctatggcaatattattcgattggtatgaagacccgaagccttcaaacaaacagcagggagaaaacgaaaacaccctgcatccacgcatcaaatacaacggttcgattgggaccgacgtactacgccgccgtattcaggaacgttgttcactgacagaaacagacgtcacagccgtacttgatgcgctttcgcacatcatgggacaggaattggcggaagggcgccaagttcatctgaatggcatcggttatttccatccgtgcctgaccactacggaacccgtaacgataagtaccaaacggaaagcaactaaagtgaaactgaaagcaattcagtttcgcgccgatcaaacattgaaaaacgagttcggtgtgcttaaagtgaaaagcctcaaaggaggactggatttcacccaactgacaaacgaagaaattgacttgcaactgacgaaatacttccgaactcaccaatttatgcggagacatgacttccaatatctttgcggaatggcaagaagcacagccatgcgacatatccgacgtctgcgcgacgagggtaaattgaaaaatatgggtggagccatgcagccgatttatgtgccgggaagcggatattatggtaataatgaagaagtttgtgtaaaaacggaacaagattagtcaactcaaatctggacgagacacagggtgagagtaaaaagttaccctcacctactctcacctttaccctcacacctgtaaccccgatgaataaatggattgagcatagagggtgagggtgtgagggtaaaacgtcaccaacatttatttgaaaacattcttaatgcgagcaactattatacaagagtacctccataccattccatattttaccggggaatcttaaccatttcaaccggctgctcctgtatcttatccaacggttgtgattgatattttacctttgagaaatcaatagattttaagtcaatgcaacgtatcgaattgttataggccgttttataataaaccttccggttagtgaggtcgatagccgaggtccattgcgtagcactgggaatatccggaatatcaccctgcgaatgttctataccgataggaatatcaaaattattaagcaagtggaaacattgctgcacggtatcaaagcctgtagcacgttgcggagctgttccccgatagaaggcagcacgtacaaaccgcgaaggaggcgtggcatcacccggaataccaagaaaaccggagttgccaccagtcggctgcaacgtaataccgctcaatttttgcacggaagcatcacccggatgaagattgacgtaattgttcaaatttgtgagttgccattcaaaaccgggggcattcgtcaatacgcctacttcattctcataaaaatgcggcacaccacctacaatttccaacacaacctgacgccccgacggttcaccgatacgccaatgtactaccgctgtcttttccagtcctacaacacgtacagaagaaagggctgccttcacctcgtcaatagtggaaaactgcgacaacagccactccgtcacttgaaggtctgccagtgtccgctggttctgtgcagcatcatacgtttcatatcccccataatgaggaaagaaaaatagtccggccgaaagtccggcctcattgattccttcggcaataaactctttttgtacaacagccagaccgaccactccatattttgccgtaaacgttagtccattgacacccgtaggagtgaatgacgtgagctgttgaccacgcggaataatcacatactcgctttgcaatacaccgcgcgcccattcaatcgtacgggcttgcacataactgccgtcacgggacgtcagcgagattcccgtacaagctacagcctgaaaagtgctgccacatacggcagcaatccctaacaataagttctttgtcatcttcatcattatttatatatttattcgctaaaaactcaatactgtataaagacaacaaaatatgggttattttagtttgcagatatatctttagaaagacaagactattgctctgtcatctgaaatagcggcatttgtattgtaaaaagcataatggcgcagaataataatcaaagagtaacaaataaaaaagcaataaataaacgaacttaaataaaaggtatccgaactcttttgagcaaaacaagaaatctcatatcccgtcaattcatttaatgatatagttctttttctcttttcctattcctttcagagtcaaagatttccatgcatcagggattgctccttttccggcaacaattcccttatccgtaatatccaatccaccgaatcccatcaatacggactgtaatacaccacctgcccctgtcagaaaataaggatttgtaccaccgtcaaactcggctataacccggaagggcggattcagattgggaagataggaatctctaaagtaatgccatgcacgttcacggtctcccaaacgggtaaacaaaatagagtagatagacttcgacatggcaggtgtcttctttctcggaacagtctgtagatagtattccaaatccctccagatctgttctttatccgtaacaagttttaacgggaaagccaacaggcagacatccgcttgtttggttatagctccatcatacgtatcatgctctgccgttactccattggctagtttccggaaacgaagtttctctgccacagtcgtccacatagggtctgattttacattcaacagtttggcagccttacaggcagcttccagagtggatttcgcgacaccgtttgtataagcattattattcacgttctttcctccttgagggttctgattccattcatccgctcctattacattcctgatttcatactctcccgcttcattcggttccgaacggcttacccagtattcggcagcagcactaagaatgggaaatcccttttgacgaagccattccaaatcctgcgtcacagcataatattgccaggctgccatagctacatctcccgtaatatgattttcaaaagggccgtaaatgttggtaactgtattatcttcgtttcctttaccactactttcccacgggtacatggctcctttatacccatgcatgaaagcgttatgcctggctgcatccaaacgctgatagcggtactctatcattgattccgccaattcgggatgcagcaataataaagccggaaaaatccacgtgtcagcatcccagaatacatgcccgttgtaaccgaagcccgaaagccccatcggagaacaggataatcccgaaccttcccgcacaaaagcatacgtgtgataaagcatactgtgaatgtcttgttgcgactgaagatcaccctcaatcacaatatcgctttcccaaagcttgtcccatgcagcgatatgtttgctccataatcgttcaacaccctctactgctgcaaatgccgtcaaccgttccacttcattcttgacgtcagcatgagtagcagcggaaagtgtcgtcccgacaatcgaaaaagtgtaaggctggcctgcctgcaaacggaccgtaaattcttgtgtatgtaccccgactccgcgtgcactccgatggcatacttccggacggggaaaagaatcgtcgaaaacaaacgatgaacaagcaccgatttcaagttcccgggtcggagattttgcgattgatgtgcagaaatcaatcgctgtctttccattgaagatgcggttgaaagattcctgcggactacgcaacgattcatgcaccgtcagtatattcgccacagctacctctatattttctttcggaacgatccgcacacgcagcaaacacgaataaggtaaatgacgtaatgccgtatattgatattcaatatgtgcaagcgattgataatcaaattctccgcaaaacaatccctgacgcatatccaaagtctgtttataaccggatatttgggaagctttcaccgtagttccgtttatctgcaattccgtatccagcatattgatgccatgcaagaaattattcactcttccctttccatagatatcataaagtcctcccaacacgacacgggaaatcttcaaaggatcgggggaagaaactaatcccagcataccattggctaccgttattccataataggacgagggttcaatctgtccggcagttattttccaggcatcttgcgcagatacaccaatgacaggccataacctgctcaacagcagtaatattaaaaagttcctttttctcatcttatctctattttataagccttttgtaaatgcacagtcagtcttttctcatcagagcagggcaacgcctgctccgacgaaaaaagagacatgctaactaaaagtttgtatggataaaaaactaatacatatatccgctcttacccggattaccgcccatctgcgaccaggcattggctgcatagcctgtcgccgctccttcaacagcaaatagagtcggttttccttccagcataccggtcacatagattgtgccgtcagcagatatggtgggcgacgatttcagttcggttccaagctggagtgaagcgatagcttttcctgtagccggttcgagtttcaccaaggaacctttttctgcatcattatagtagatatacccttcattatctatagcaggaacgccataagcagtacccgctacttccgttgcccacaaaacggaacctgtagaagatatggcagtaatatatttgtcagtagctacatacacaaccccatttccatcaaccaccaagccataaccggtttgtttattttcccctttcacggcagtataccattctggagtcgaaacttgccccttggtagtcttcttggcatcatagcaatagactaatgcttttgtctcattggtagatatgcgggctcctaaattaaggcaaaggatatatgctttgccatctgcaccaatagcgatctggctgccattaggctggtcatttggagcataattctgctcattggtcgacttgctccaactattgccttccgggaagaatatgtgtgtaccatacgatcgtccactactctgacccgtgttaacaagtatcctgccatctttcaatcctacacaaccaccataacttccggaagacgttttttccgaatatttaagtaccccggataccttatcataaatacggaaatgttttccatctgtgcttggcgccgaattcgtcaggatcatcacatattggtccgtgacagccggagcaccgaaaggacgcatactcgattttgcgccaatcgctgtaaaccacatctgcgtaccaccgtctgcaccgcctttaacagcatagagactggcagacttggatgcatctgctcccgccttggtagtattgtctccgacagccacatacaccgttccgtcggaatccaccgtaggagtcgggtgctgatagtcagaacctcggttcggttcattgttctgtccgcaatcaaatccccaagtccgttcaccgagtttcgtgaaacaaaccaggttataattgctggaagaaacatatatatactgaccatctgtgcttgttgccggagaagtgccgtacactactccctgctcatcgtaggaatgagaccataacacgccaagactaccggctccctttgctatatccattgtgacagtcttcgtatctttcctttttttattgtccgtcacagtcagtgatacgtttatttttccatgcgaaccgaaagtgattttcgggttttcctcagtagagaggatagcaccgaatgtccattctcttttgacaatctcagacccttccgctgctttcgattgatccgtaaaagcaacctcttctcccgctacaattcgttcgggcaaccagctgaagtctgccgtaggacggacaccgtcatctattattttaattgtcttttcaaaaactgatttcatcgcaccgcgatccgaagtgacagtcagacgaaaaagatagtctccgccctcttccacgctaaatggttcgggagcagtcagttcgtaggaaactttacccataaattcccatttgcagactgcaatctgggcattctccgccgtcgacgtgtttgtcagggtaatcagatcaccaatctcataggattctttatctgtagtgaatcccgcctgtacccacgtctcttcatcaggtgtacacccaatcaacagaccgatagcagctaccaataaatatatgattcttttcattgcgtttctgtaattttagatgatcgtttcattacttcacgtattccaatttaccgatgatgggataatgatcggagatataagtgatattctgataaactttatctattgtctcgaacttcaaagccttaaagcctgtacaaaagatgtgatctacaatataaggattggcggtaccaaagcctgtataagagtatttcgagtctgtgatcggagccgataagcggacatttgtcatgaatgttttaactccgttaaagatatcactgtcaatctgcttgttaaagtcggcggtcagtaacatcggcaatccttccggattgagctcggacattttattcacaatcacttccatcgacttgcccggagcgatggtagaacctacatcgatgtgagtattgatgaagaagaatttcttaccggaagcaatgtgtttgaaaattgcccatgttgctatacgaggaacggtactgtcccatcctagagaagccggtacatccggagtttcggaaagccagaaacaatcccacttgattagttcaacagcctttttccgataaaagataggaacaaactcatcattgttggcattgttggcacggcgtcccttaccgacatatccataatctttccagttctcttccaaccacttcagttgtggtggccgcgcttcctgcataccgatcactgtcggtttatgttctccgatcatcggtataaaagctgccgtacgggcttcccatgacttttctcccgtatctttggtattataataccggatattgaacgacatgactttaatttggttatcattcagtgacgggtcttcctcttttactgtttcagggtccttataaaattctgaataatcaggagtagtattactgcatccgcctaacgctacaacatagatagcaattacaggcaatatctggttaaatttcatcatactaaatcttttatattttaattccaattggggttctgtgatagtttatatccggcactctcatagtcgcggatcacctgtgcaggaacaggataaagatattggcggtcgtcatcgtaccagatgcggtttcccgtaccggggttatatctcaaatcgtatccgcctgcggcatttgctgtggcataaagtcctgtttcattctttacgttcaccgttttgcagtctttattggatgattgcgtaccgttatcagtaaagtagcaatcaggagttccgtcaccattcaggtcaatatccacattcaatgcgctgatgtgcatacctgtccacggtagttcctctatcagttcaccacatttccaacgacgcaaatcattgaatctcgttccttcagccaccaactcaatggtacgttcccgacggatttccagtaaaaccggattagtgatattcggataaaagacctgctgcaaatatgaatcaacagttgtagggagtttttccgttccgcctgtaattccggcacgtcggcgcaaagcgccgatggtagtgttccagtcagcatcagtaagcccacccagttcggcttgtgcttcggcatagtttagcagcacttcagcgtaacgcaacagggggatactgttgttgttcttttcattgttatcgtattttgtatcgtcaagagaatacttgattacatgataaccggtcaggcaaactgtcatatcggctactacggcttttccgtcacgtttgaaatccagtccgcggatggtctgtgccaaacgcaggtcacggctcttcatctcttccacgaagtttctggtttcatagcctgtttcggcagtgaacggggtaccgtccaatttcaggtaagtattgacaaacggacgaaccagactccagcctttaccgtacgacagcgagttgtaccagtaattttgagtcccgtaaatacctgatgcgctattggcacataccgccagaattacttcggaggtaatgggagcttccagatagaacaaatcacggtaggcccctttggtacctgttgccgtattcagcgaaagtccgctgttgtccatcaccagtttggctgcactggcagcatggcggtaaagttcttccggagtgatttccagacctgtcagtttgtgataacggcgataggcggcttcgaacaggcacacacgtgatttgagtgcggctgcagcccatttggtgagtgtagagctattgacagaagaagttgcctgaatatgttcgtaagcaaaatcgagatcttcgatcatattcttgataatgacgtcccggctgtcacgctctttatacatgacatcgtactggtaagactggatttcactgccaaaccagggaacttcgccatattgggtcaacttgtcataataaaaccaggcgcggaaccaacgggcgatacccaagtaattatcgcgggtagctgcatccactgtacactcctttgagtagcaaccgtcgataaaataattgatgttccgcagggttccccatgaccagctggtagctgtttccgaattgtacgcattttgctgaataaacacattcgtctgccgtacagcggcaatatcacacatctcatcctgctgatagcccgtagaaagtgtaggcaatgcccgatagaaggaataggcataaaggcgcaatccggactcgctgccgaaaaccatagatttgtcagcctctacctgcatcgtctccgtcaaatcgcaactacctagcagcaccgttgcacacagaagcaggatattacgtatagtacttaatcttttcatatcttctttgtttctatttagtaagtaatagagattcctaaacttagattccgcatcgtcggatagttgaaaccatctcctttattaccggaagtcaggtcattatccgaaccttttgttatcactgtcacatcgtaatctttcgtgtgacggtagagtggagaccacgaccataagttctcgcccgagaaatagacagatactttagaaaacccggcttttgctatccatttctttggcaaattgtaaccaaactgcaaatttttgagccggaagtaagatacatcctgcaagtagcgtgtattggccgtgcctttatataaaggattgtaataacccgaataacgcggcagataagcatcagggcggtctttggtccaatagttattcaagtgccacaccggaacttggttgtaaggacggttatactgtccccagaaagaactctcaccactgggataccagtcttgttttcccacaccgtcgaacatggctgacaaaaagaagttattccagtcggcactaaatgagagggtatagatgtagcgcggttcggagtttcctatgattttccggtcgcccggtgagtctactgtgttggctccgttatcaatagtacctgtattgttcaagtcttcgaagcgcatatcaccgggataagtgatgtaattgacagatgtctgcatcaggttgtttttgtaaccctttccgtcaaaagccgcatcgatttcgtcttgtgactggaacagtccgttacaaacaaatccccaaatctcaccgatacgctgacctacataataatcatccaagtcacgtttcgggttattatatttgtctatcaccgaatgataatcggcaagggttgctttgatgccgaagctaaatggtttgccagccaaacggaacgagtcgttatatcccaaagaaatctcgtaaccataggtactcatgtcagcatagttccctttgggcgacgatgcaccgaatgtatcgggaagcgtcggtcccaccgtatacatattaacagtcttacgtacgtaataatcggcggataacgtaattttgttgttccagaatcccaaatcgataccgccatcaatggttcgtgaggtttcccaaccgatattgtcaggaatttgggcaggattgagcgtgtagcgtaactgtgccttaccgtcgagatagcggccttcgctcgatgagccggtagtggaataagtcttcaatgagaacttttccagataagaatacggcttcacattactattgcccagcgcaccataagagacacgcagctttccattggagataatagccggatttaccttccagaacttctcttccgagaaacgccatgctgccgaagctgaagggaaaaatccccattgcgaattgttggggaacttcgaagaaccgtcataacgcccgttcacctcaaatagataacggttgtcataggagtaattcaaacggaagaatgctccggcataccgccaccggttaccatcactcttaatggacatattatctcccatagcaaaatttatattttccacatcaggcatcaacaaaccattccgctccgaagagattgccttgtaatcctgctgttcgtaattatatcccgccaaagctttcatataatgttttcctgcaaatgtattctcatattcggcatatacattggtggatatataggtagtctgttgcactttctccaacatcttatcatctgtttccggtactccgagatatttaatcaccccttcgtaatcgctatacggaacagcggtagtcttcttgtcttctataaaatctttcgtacggaaagagaagtctccggtaaaacgcaatttgttgtccagcatggttatattcagggtagtcgtatttttcagcgttttagtcgtacgctttatccagttgttgcctgttaccagtccaccgacagaacgtgctccggagtgtgtcaaggttccgtccggattgaagattggttcggacggatgcccttccatgttgatggctttccaaaccagaccctcattctgttctacataacccaatggttgtgtatatttatcatgagtatagtctatattattggaaattttcagccagctgaacacttgtgcgctgattttggtacgcatattcatagtgcggtaggtgtctgagttataattgaacagaccgtcataatcgtataaccgtgcggaagtgtagtaacttatttttccgttcgaaccgctgatagatacattatgcgactgtgcaaacgtatgatccttataaagcgcatcatagtaatcctcatttccatagtatgtatatttcccatcggggccaactgctgtctgtaacgtatttcctgccaacttccgttgccggaaagtctccagccattcttttgagaaaggttgtgacttattaatgctggtaggctctatcccgcggtaattgtattccgcctcacgaaacagataagcccagacataaccgtcatcaacgacatccggcacagcatacggagtttcataggagaaatttcccgtataattgaccgtaaacttatctttttgctttgacggatcttttgttgtaatcaggacaaccccatacggagcacgtgaaccgtagatggctgccgaagccgcatctttcaatacggacacgctttctatgtcattcgggttcagcatggccggatcgccttctacaccgtctatcaataccagcgcactaccgcccgctccgatagacgttacaccacggatattatacgaagccgattgattgggcttaccgtcgactaacgaaatattcagatttggtacagcgccttgcaacatctgtgtgacattagccaccggacgattttcaaatacatccgatgatacattttctaccgcccctgtcaagtttatctttttttgggtactgaatccgaccaccactacttcgtccaacgtctgtgtatcatctttcaacactactgtcagataattcttatttttcacgctcacctcttgcgtcaaaaaccccaggtaggatatttgtaccacactcccttcactgactgtcaactggaacttaccgtccatacctgagattgtacctgccgtgccattcttctcttttatattggctccgatgacaggctcccctgacatgtccttcactatcccgctaatagtgtatttcctggaggattgttgtgcggactggccgcttttcttcttgatgataatatctttcccttggatagtgtagctaacatcttgtcctgccaagacctgttctaccaccttctcaataggtaaatctttggctagcactgtcacaatctttttggtattcagatcgtttgttgcaaatgcaaatgaatatccgttttgcttctgtattgtttcaatagcctgctttactgttacattcttcaactgcaaattgataagctgcgcaaatgagcttagataagagcatagcaagagcaggaccatgaaaaagactttcttcttatttttcataagtcaatggataaataattgataaataggatgagaagtttaggattttatttatatttgcctaagctttcatcaattaaagtcactgtggcttttaagatagaaaggcaagaggtcaggggatggaaaaggaacctgacctttttatatttctatcaggagaggtgaatcatgtttttactaaatggcttttcatatttctttaagttttaaaggtttaacatctgttcatttgggaagtgtgatcacaatattttttccattaatggtataagtcattttgtctgtagacgacaatacattcataatctcctgaatactttgctctcttttacggaagtttccataaaaacgaatcgtatttaacgtgtcgtctgcaacggttatttttacgtcatagcttctttccagttctttaatgatatctgaaagcaaaatttcatcaaagtaaaggcggtcgtttgtccattcagcactgtaagcggctttggtatcggatacagatagttttcctgtttttttatccaacagcgcctgttggtccggatgaagtatggtctctttttgccgggtattcagcgctacctttccttccagcagacagactttagcttccaaatcgtctttataattccggaaattaaatttagttcccaatactttgacgtctagttcttccgtatgtactttaaaaggtatctcctcatttctggttacttcaaaataggcttctcccgacaagttcaatgaacgttcattaattccaaaatcttgtgcatagctcattttggaacccgcattaagccaaaccaacgttccatcaggaagatacagtttggtttttgaaccgtatggagcttccaccgtaatctgtgtcaattgattccggagtactctctttccactctgaaaggcaatcgttccacagaaaaaaacaattacaaccattgcagcggcatacatccacggactgatagtgagtgtttttcgttttaccgatggttgcacaaggttttctgtatgctctaaaaataattgataagcccgctctttgtcgaaatgctgttcatctgcttcatcagaagcagcgatccatacttcttgcatatcggaaaaatatttccggttttcttccgaaacattcagccaattctgtaacgactgcatctcttccggtgtcagactgtttgtcagataaccgattatccaatcattgactatatccgtatgtggtgattgttcattcataaaagatagtgcctttatatatactacagttttttataataacagggtaggataaaaagcaaaaataatacataaaaaagtgcccagttcttttttaagtattactaatgcgctctttatatgatacttaaccgtatttacagaaatgccaagttcacgagaaatttcttcgtaactcatttcccggaagcggctcatggtgaatacctgtttgcaggcaggcggtaatttgttgatagattcgtggattttcgattccaattcttcttttagcaggttgcctaaaggatgctcattgtcagaaacgatattttgcaattgaataccagcctgttcaatggtagaaaaacgtatctctgtctcctgctgtttgagggctaagtagttcagacatttattgcgtacggctattatcagatagttgcgaagaggaggcaccagttccaatttgtctctgacttcccaaagatgaaagattacatcgttcactatgctttccgcctgcactctgtctttcaagagataataactaagtttgcagagagcaacataatgataatcatatatatatttatatgattcattatccccggcctttaacttttttataatgtgtttttcatcaattggaatcatattctgttttttctgctctgcaatattcggataatatattgaaagatgcaaattaatcagcaaaaaaattggtattagagaaaagtaccggaaacatacggatgcgtaaaccagaagcacgaaccttccccctcccgggattcgactccaatctctccacccatccttttgaccagactttggcagatggataaccctaatccggctccttgtacgaacgagtccaattttataaaacgattaaaaatttcatgctgttgttcatcaggaatacctttacctgtatccgtcacacagaaacgcacctgactctcgtcttccaatgtataggaaagtgtaatcgagcccttggtagtaaattttaaggcattggtcaggaagttagagagtacctatataattcgatttttatcagcattaatcacgatctgtggtgaactttcatcaaaacgcaattcgactgcatcgtcacgttttttgtgcgagaaagtagcaatcacctcccggcaaagttgtggtacatccacccatcccatagtaagatctatcgcaccggcctcgattttggaaatgtccaatatgtcggaaataaggttgagcaacaactcactattctcttgcaccaaagacatgtatgaatggcgcaattcctcctcatcggtttcggcaagcagactggaaaaacctacgatggcattaagaggagtacgtatctcatgactcatgttggcaaggaatgccgatttgagtctgtccgattcttcggctttttccttggcttgaatcagttccagttccacctgtttgcgggtagtgatgtcggtagccaattccatgattgcccaacgcccgtcaagccattttatagccatactctggatggtgtaccaacgtttggtgaccggattgtagtcttcccaaaaatgaacgcctgtaaacttacggttggcatcaagcaactttggcttcgggcagtgtttacacccattttccaatcctgcattcaacattctccaacattctgcattttccggaacttctcctgcttcttccctgaaaggcttattggcaaaaatcactttcagtgtatcgtaatcgctcacaaaaatattagcattgatattatccaataccttctgcatggttcgctgcgactgttgcagagatatttcaacttgccagcgtttggtagcagtggatacaatttgcgatatctggctcatcagttccacatccttttcatcccattgtttgttccagcaaaagttaaatgaaagaaatccgaaatgtactcccaattgtgacaaggggaatacagcgatggcttttacaccttgcacttcgagcatttgagtaataaagggatcgagcgaataaatatcggacgtacaaatgatatgtttttcttccagcatgtcgaaccaaggttttcccgcttcaatagtcatactccgcaggtaatctatagcgggttctataccgtcgttgcaccattcgtaagtacagccatacgtaactccatcgaggtggttttcccatgtcgccaaacgatcgacgccagtgtagcggccaatctcggccaatgccatattcatagcagtaggtatgtccggttccagttgcagaatttgcaataccttgataaataatgcctgccgccggttagtcgcttcgagattctcctgaatagcaatcaggtctttagatttctcttcaaccatctgttcgagtctggtacggtactgctccagttccataccgactccatgaggttcgggatcagtggatttcatgtttaatcaataactgtgaatagaatttagtttagtttttgcatccgaacgaaatctcgtcttacactctgcaaatatatacatttattttagaaaccaatctttttcccaattaaaacgatttctttttctaaaagcctaatattcgagggtttatggcaaagaacatcagtacattacacaagtactctaccagacaagttcttttttacagcaatcctgatttataaaaacattcaattctattttctatcaattaaagctcccaataattaaattcatatcagtttcaatcctacgattgaaataatcaaagttgtcataaagaacaaacgtcccaaagttgccggttcatgaaagaacaggataccgatcaatacagtccccactgctcctatccccgtccaaacaggatatgcagtgccgataggcaatgtttgtgcagccttcgccaacagatacatgcttaaagttacagagattacaaaccccgttccccacaaataaaaatcggtgcccgttgctcctttcatcttgcctagacaaaaggtaaaaccaacctcaaacagtccggcaataatcaatataatccaattcatatcattctatttttaaattagactgcaaaattaacaggatacccggagctttcactttacatttgataagaaatgacggtgtaagagtattatcaattcttcttttcctatggtaactttttgtatttttgcagaataatgattcaatgcgatatggatatacacgaaattataaatagaatatatcggatgccggagacttcggtggagaaggtggttaaacatctgtcaaaggtcacatatcccaaaggtcaccatatattggaggctggcaagactgaaacgaatatctttttcatcgagaaaggaattaccagagcttacattcccgtagacggaaaagaggtaacgttctggattgggaaagaaggatctaccattgtctcattgaaaagttatgtaaataatcaacaggggtatgagtcgatggaactgatggaaaactcggttttgtatttgttaaagcgcaaagacttacacgaattattcaaggaagatatccatattgccaactggggacgcaaattcgccgaatcagagttcctgcaaacagaggaaagacttatttctctcttatttaccactgcatccgaacggtatatgaaactgatacaaaataatccggagctattacaaagaatgccattggaatgtcttgcttcttatctgggaataactccggtaagtttaagccggataagggcgaaattgaaacgggtactttgagataaaaacatatttttcaaaagcaaacagaaagtgatatatttgtgttttgaatgaatcaaaagagagaaatcatgaatatcgaagattatagagaatattgcctgtcagtcaaaggagcaactgaatgtatgccgtttgataaacatactttggttttcaaggttatggataaaatgttcagctttgcaacgttacgccctaagaacggaagattctgggcagatatgaaatgcaaccctgataaatcggcagagctcattgagcaatatgaggaccttttttggggacctttttcggataagaaacattggataactgtttacttggaaggagatgttcccgataaactcataaaggagttgattagccactcggtagaggaagttataaagaagttacccaagaaaaaacaagaggaatacaggaatatgatttaggattcggaaagtaaacatatccggcactattattattgctaaaagtagagccggataaaatcatcgtatatttaaaaacgtatgtcccagataccgcaagacttctctaattctaccaaagaagctacatatcctttcatggtttcaagatattcctgctgtacttcattataggtacgttgagctaccaatacatccaaaatattgatttcaccacgtttgtacttataaaccatcccttcaagcaccttttgtgaatcttcgagtatccccgctttaagctgggctaccttctttttttccgcttcatggcagaaccatgcttgagtaatctccgcctgtatttgtaattccatctccctttccaatatttcagattgagcaatacggaatttagctgctttgactgctcctttatttatatttgaaaaggacagcggaatagatacccctgcggtagcagaacgcgccggaggaagaaaaccgttccagtctctttcataagagactgacaaaccaatatccggacgacgctccgccttcgtcaacttatacgcacgggcagtgacttcggtacttttttgagctgcaagtaagtctatacgattgtctaaaccaactttgattagttccgacagcataaactcacggttcagttcctcccaattaccaaacggaatatgaagagtatctgctgtcacgcccatctgtttgttaagcataaccaatgaagactgatatgctgcttcctgtccgtaaactgtattgagtaaagtaacggcttccagtttcgactgacgggcatcattctccgtaatttctcctaccgcataacgcaaactatccgattggctcaattgcagcatatattcataagaacttcgctgcaccttaagtaactctttctgcaaaatagcttccagaaaaaaattggctgcctcggctcgcaaatcctgaaatccctgttctatcatcaacttctcaaacgctgcctgactgcgtgcaagtttgattcgtgctcctcgtttatttcctaattccaatgaataggaaagccccaacgaaaaagtttcattaccagcttcaaatccaagttccggatcaggaaacacctttgcagccatagcttccgcatcagctatactcacattcaacttttctgccagataattcagattgttctttcctacactgttcagatattcttcgaaagaaatattccgttgtggttggccgacgaggatttgcgcaaaagcatgaacagtcatcgcttccacaagcagcaaaaggagcaagatattaaagtgtatattctttttcatcattcttctttttatttaaaacgttattctcaatcagatagtaaaaaaccggaagcacaaacagggagatgagtgatgagaacatcaatccatacacaatgaccgttgccaaaggacgttgcacatcactgccaatcccggttgccagagaagcgggaaacagtccgagtaccgttgtgacggaagtcatcaagatagggcggaaccgttggcgtgccccttcgataacagattctcgaagttccattcttcctttgcgcaaactatttatctgagataccataataattccgttttgaatggaaagtccgaacatggcaataaagcccacggcagacgatacattcaatgtcataccgcgtacattgagcgcaagcattccgccaaagagcgccaacggcacgatggacaataccagaccggcttgccggaatttcccaaacgtagcataaagcaaaataaacatacacatcagtgtcaacggaagaatgacagaaagacgggtataggctctgttctgattttcaaaagcacctccccacttgactgtgtatttgctgctgtcatactgtactttctgattaataactccctgcgcttcttttaagaaagaggccagatcgcgtccacgcagattcaacttaaccgtcaggtgacgtctgttcatttcacgagtgatcgtactttctccgacactcaatttcacttcggctacctgcgaaaggggtattttagctccggtagaagaggtcagcatcaatccggctatcttttcgggtgtatcccgcatttcttctttatatttacaggtaatgtcatattgacggtctccctgataaagctgcgcaatagctttccctccgattgctacctctatcaaatcagctacatcagacacgttcagcccatatcgggcaatcgcatcccgattcataatgatttgcagttgaggtaatggaggttcctggtcaatatccagatcaacggcacctttcaccgttcccagcgcccgggtgatttcttccgcaatacgacgtgtttcccgaaaatcctcaccatacacctttacaaccaattcactatgcgcaccggctattttatccatcaccccgtctatcatcggttggctgaatcccaccctaaaaccgggcagtgtcttatattcttcttccagctcatgaatcaaatcttgcttggtctttccgttcggccattcatcataaggctttatcccgatagatacctcaaaatgcgaaggagtgaacggatctgtaccatcgtcatttctccctgcctgaaccatgatataagttacttcgggatacttcatcgtacgggaacgaagtgtatcggacatctctctcgatttctcaacagaaatgccgggaggaagattcacctgcaaccagatcgagccctcatccaattcaggaaggaaatctttccctacaacaccacttaacacaatacctgcaatcagaatcaaacatgaaaagagtatggtctttactggtttctgaatgagtttctctattgcgccagtatatttctccttcaatttttccagccatttattcttatagaccttgcgcggcttacggtaaatagcataagccagtcccggaatcagcagaagagcaaccgaaagtgctccgatcattgcataactcatcgtaaatgccataggagtaaacagtttacgttccacacgttcgaaagcgaataatggcaagtaggctgtaataatgactatggtggagaaaagaatcgggcgtcctacctctttggctcgttgtgcgatacttttttcttcgatgtactgttcgggataatcctcacgtttcttgagaatagtttccagcataacaatggcaccatctacaatgattccaaaatctatggctccgagtgacagaagattggcagggatatccgtgagatgcatcaggataaaagcgataagcaaagatgccggaatggtgattgaaaccagtaatgctccacgccagttacccaaaaacagaataagcacaataacaaccaatgccatccccattaatagcgtatgggaaacagtatccaaagttgtatccaccaggctggtacgatccagaaaagtatgtatacgcaccccctccggcaaaatttcatgattcaattcatccacagccgcatgaatgccatccaataccttagacggattttcatgtttcagaagaagcacaatcccttccaaactttccgaataatcacgggtacgatcggtatatcccaacacacctttcctctccagattaccgtatttcaaagaaccgatatcatttaaaaagacaggaaccccggaagttgtagtgactacaatatgccccaaatcgtccagattctctatcaatcctataccacgtaccacataccccagatctcctctattcaatatgctgcctcccacactggcattattattttcaatagcctcaataacctgactaagggataagtgatattgttccagtttataaggatctatttctacttgaaactgggtggtgatacctccgaaatttgttacatccgccactcctgaaacttctttgatacggggaataaccacccaattctggaggtcggtcagttcacgaagtgaatgttggtcactttctataatgtaacggtaaacctctcccacaggtgatgtcaacggatcgagtccgggggctgccccataaggtagttctacttcattcaatctttcctgtacccgttgacggctccagtaatcttctgtcccatccttgaatacaatcgtaatcatagagagtccgaacgtacttttgctacgcataacatgcatgccaggcaaaccgttgatggcacgttccaaaggaatagtgatctgttgttccacttcttcggcagctagccccggcacttgggtaacaacctgcgatgtgacatctgcaatatccggataggcttctattgaaagttgcgtccatgagtaatatccgaaaacgcacatcatcacaaacagacaaagcattatccatcttttctgtataattgaaagcatcagatccttcttcataatctcctattttaaataatatcctccttcactgatgactttatctcccagatgcaatccatcgtttatcacagcaaatccatctttggtcgcttctaccttcaccggtgtttttacaaagatatccggagtaacctgcacatacacataactgtctttctctccctgcaataatgcgctctccgaaatctgaatctgttcaataggagcactaagaaaatggacggtagtatacatgcccaatttcaaatgtttcttcgaattatcacaaaccgaaagcactttgatagaccttgtatcttcgtcaaccgcctcttctacatgatagacgttacctttaatcaccatccccggtaatgcagacacttctatatccagactactgcctgcattgataaatcgaatatccttttcttttacttgggcggcaatccatacttccgacaaatctgccactattgcaacaggttcggtatcatctttcaggtattgtccggtcacaatattattctctataatttcgcccgaaataggcgaacgcaccacaagaggctgccccagtatcatattctccggatgctctacctgatatacttccaatgcagcagacgcattttcgaactctttgtcggcaataagcaaagcattttgtgcttcttccagctctttctgtgaactaaccccgttctttatcaggtcttctttgcgctttaaatctttcttagccagctcacgtgacgataatgcctggaagtattctttttgtgccgtagtaaaatccggtgagctgatttcaaacaaaggggttccccggttcacctgttgtccgatttgtatatacgattttgtaactcttcctgcaaaaggggaagcaatgcaggcataacgggtaggaataggacgtaccacaccggaagtaatcacttctttggaataaagttcaagtctggcctcagtcacttttatcttttcagataaaaaacggtctgtaatctgtactgtgtcaccttccatacgataaccactctgttgttcttcctttgatttactcttgcatgcggtaactagcaatacaccgcaaattaaaagtatttgcaaatttttctttttcatcatcatccataaaaatatagttagcattctttttcggatgcaaaggtaagtggacgtgttccggaagcctgttagagatttgttagaacgctattagaattttattagagtcttacagaagccatttcaagacgaattttctttttttatgaacccgttttgcaggagaacggcattttttgtctacatttgccgaatcaaaaaccgaacttgagaatatgaaagttatctatcaacagggcagacgcattatattttttactatattctcctttgttatttctttgctatactactgattattaatacactatcatttgtttatatcgattgtttttcttatctttataagatatattaaaacataaactaacatgaaaattggcataattgacctttgtaaacaaatagaagatcctaggatgaaccgcaaaaaagtacataaaatggaaaccattatctatatatccattgctgctgtaatctgtggcgcccaatcctggaatgagattgaggaatttggcaatgcgaaaattgcttttttcaaaagtcgcatacctgacctggagttcatccccagtcatgatacttttaatagattcttcagtataataaagcccgagtattttgagttgatctttcgtaactgggtaaaacaagtctgtcaggaggtgaaaggcgttgtagctatagatggcaagctcatgcgtggtccaagccaatgtgatggagagcatactacgggaaaagaaggattcaaattatggatggtttccgcctggtctgccgctaatggaatttctttaggtcaggtaaaagtagatgataaaagcaatgagattacagctattccattgttaattaactctttggaactaagtggttgtattgttacaattgacgcgatgggatgccagaaagatataacccagaccattattgagcatgatgcaaattatattatagctataaaggagaataagaaaaaaaattatcaactagctaaacaaatcattgacgattatcaggataaagatgaaataatcaatagagtcaccaggcatgtgtcggaaaacaccggacatggaaggattgagacaagaacatgtactgtagtcagttatggatctattatggagaaaatgtttaagaagaaacttgtggggttgaagtctattgtagggataaagtcggagagaacaatagtagcaacaggagaatatactcaagaggtcagatactatgtaacttcacttgataataccaaaccggaggagattgcatctgccatcaggcagcattggtctattgaaaataatcttcattggcaactggatgttacctttcgagaagactacagtaaaaaggtgaaaaatgcagccagaaacttttcggtggcaacaaagatggcacttaccatactaaagaatgaaaaaacaacaaaaggaagcatgaatctgaaaagactaaaagccggatgggatgaaaaatatttgtcacaacttttacaggaaaataatttttaatgcgtctgccctgtatctatcaattcattttatccgtacctcatctggaactctcttagctgggcttccgtttttttatttctttcctccattacaggaaaacaacaaaaatcaaagcaatttctctcaatcatttgtttattatttagtcataatggtatttgccctctttatatacagacaggcaatccccttatcatcatccgtaatcaataaagtattatgaataattggaaaaagaaatttatcattatatggtccggacagttattttctattcttagcagttctattgcccagtttgccattgttctgtggatcagtcttgagaccggttcggcagaggtgctttcatttgctactatcgccgcacttttaccccaagtagtattaggtccctttgccggcgttttcgtcgatcggtggagtaggaaatggactatgatattgggcgacagtttcgttgcactctgttcgggcattattgcgttattattctatctggacgttatcgaaatctggcagatttatctgctgcttatgctccgttctgtcggaagcgctttccacgcacctgccatgaaatcatccataccgctgcttgctcctgaaaaagaactgacgcgtattgccagtattaatcagacaatacaggccttatgtaatatctgcggtcctgtgctaggtgccgcattgattgtcagtacgaatatgagtgtagttatgttgctcgacgttgcgggagcagccatagcctgtacaacactcatgtttgtatttatccctaatccggaaaaaacagaaactgaaacaaccaataatgtactccgggatatgaaggaaggctttcaggcaatctgtagcaattgtggtttgaaatgggtgatggtcactgaagtactcatcactttctttatcatgcctgttgttgctctgataccgttgatgactctgaaaaacttctccggaacagcttatcaagtcagtctgatagaacttctttttggttcgggagcattagtcggtggtattttactgggaatatggaatccgcgcatccgaaaggtcgttatgataaacatatcttatatcataataggagtttctattttcgtttccggaatccttcctccttcagcattcattatctatgctatatttgcaatagtacagggtatttccatgccgttttattccggtccgtttacagctttgttgcaaacacagattgaagtgtctttcttggggcgcgtattctctttgttcgacagtatcagtttgttaccctccattttaggattactggcaaccggatttattgcagacgctatcggcatagccaatgtctttgttatatgcggtattgcaattgtgataacagggacacttgcattcttcattccatcaatcatgaatctggagaaaaaataaatgactaattttattaactaatccttttttagaagcatttttttaggttattttgcggaacaaatatcacgaacttgtcaaattatggattggattggccttgatttaacattccctatcaccgaccctacatggatatttctccttgtactcctaatcatattgtttgctccgatattattgaataagctgcgcatccctcatattatcggtatgatcctggcgggattggctattggcgaacatggatttaatattctggcacgcgatagcagttttcagttattcggcaaagtcgggctctattacatcatgtttctggctggtctggaaatgaacatgggagacttcaaggagacgcgaaacaaagcgttagtgttgggattactggcttttatcgtccccatcgggattggattcgtggcaaatgtatcttatctgaaatacggcgtaatcacttctgtactgctagccagtatgtatgcctcccacacactcgttgcctatcccatcgtcacccgcttcggtatatcacgccatcgtagtgtaagtattgccgtaggaggaacggcggtgacggatacgctcacactgttggtactagccgttataggcggattattcaaaggagaaaccggtggtttattctggatttggctagtagtaaaagtaatctttctaggagcacttatcatttatttcttcccacgcatcggtcgctggttcttccaccgatacaatgacaacgtgatgcagttcatttttgtgcttgcaatggtatttttaggagcaggactgatggaactcgtaggtatggaaggtattttgggagctttcctcgctggattggtactcaaccggctcattccgcacgtttctccattgatggatcatttagagtttgtcggtaatgccctcttcattccttatttccttatcggagtaggaatgttaatcaacttacgggttattttcggacatggggatgctttaaaagttgctgccgtaatgataaccatggcactgacaggcaaatggattgcttgctggctgacacaaaagatatacaagatgtctgttcttgaacgaaatctgatgtatggtttaagtaacgcacaggcagcagccacattggcagccgtattggtcggatataacattattctgcccaccggcgagcgcttgctgaatgacgatgtactgaacggcacagtcttgcttatcctggtcacttgcgtagtgagctcactgattaccgaacgggcagccagaaaggtggcaatggatgactcactatcggaaaatgaatcttcaaaagaaacagagaagattttagtatccatagccaacccggacactatcgaagacatggtgaatctgtctctaatcatacgtgattctaaattgaaagataatctactggccctcaatgtaatcaacgacaataataattccgataatctacgacttcgaagcaaatattacctggaaaaagcggaaacgacagcaacagaagcaaatgtaccactgaagaaagtcacacggtatgatttgaatatagcttccggcattatacattcagtcaaggaaaatgagattacaagtattatcaccggtctgcatcgtaagaaaaatatcacagactcatactttggaatacttgccgaacatttattgaatggattaaactgtgagataattatctctaagtttctaataccagtccatacaatcaaacgaattgtcattgccgtccctcctaaagccgaatacgaatccggttttcctcattggatggaacatttctgtagaatgggaagtaccctcggatgccgggtacatttctttgccaatgaaaaaacgaccatacgcctacaagcgtggataaagaagcgacataaacaaacgctgaccgatttctcccttttggaagactggaatgacttgctggtattaacaggacaggtaagctacgaccatttattagttattatcagtgcacgaccgggaactctctcttacgacagttcttttgagaaactaccgagacagcttagtaaatatttctctaacaatagcttaatcgtattatatcctaaccaatcgggggaaccattagatacgtcattcttctctaaactatacactgataccgaaacccggcattatgagaaggtgggtaaatggttttacaggtggtttaagaaagactgatatttcatagtgcctcccttgttaaaattaaggctgctcatacaaaacaagacagactaattttgtatagttgtcaattttccattctcaaaatacaagtattgtcccattccatatacccattgttcatgtatcccccatgcaccggtagttttattaataccacccgaaggatgcccccatgattccaaaaccatagccttagtcatcccaatgcacacttggccttttaatatcaagtccgccgtagcttttccgtatttcttatataattctttagttctctgttgtctttttatactagctaacttctttgcctcttcttgtgctaacttttccttcatcaataattcttctttagcaagtctttctctttccattgtttcctcataaacttccgcttcgacaacatccaaattatagaaatacatctgagtcattcttttctgattatcaaatatgcttacttcgtatgaaaaaagagatggactctcacataatggcattatcaaatcggcactatcattcttcagaacaaatgaaggaaccatataagtatcttcactgcctgaataggctatttccatacatttatatttattaatcggatgaatatttttaatgtatatgtctttattcaaatacaactgtttcattttatccataaatcctaatacaatgacaggatagtgttgcctagtataactgaatccatcatactcaccacgtttagcataccaataaagagtatcaccttcttcagactgtagtgcaaaaattgtattttcttcaacttcggcatcagacagctctatatctaaaattttaaaagtcttgccttctatctcattataaggtgtgaaaatgccatcacgttttcccataggacatttcgttgctctatatatttcaaatggaaaaatcctatatccttgttcaagtatatcgtgaaaagaagcacataaagtaacataattatccttcaccaactgaggtttatatctcttggaggttatttgatttaatttataatctttaggtttagggttggatcttttttttcgccaaatagtgtcaatggcaacaacctgctcattagaagttagaaaattagcataatacttaggtagtgattccgaagaatttggattccgaggatagaacaaaatactttgcccaataaattgtttataatatgaagcatctttataagggcgtatattagttaatgaatcatattcaattactacagcatcctttttatcttttttcggcatactagtatcaatcattttcatattctgcgcataagaaacagtatagagcgtaaatacaatgacagacagcagaactttcattttcataattctttgttttatttctacaaagctaattaaaaatacaattcgtccacaatgatttcagataaaaagcccccttttgttttcccgtattatctatctgtttatatttgtagaattatgtaattcacaaaaaacatttaaagaaaggaagcaccatgccaaattccgaagctattggtgcgacttcgattcatgaattggttaatttctaaatacaccgatatggcaacttacactcatttcgcaaaacaacccgatgtcttaaaacatctgatactctgtgaagtactcaagaatgaaactccgcaaatatatgtagagaccaattcggcatgtgccatctatccgatgacacaaaccccggagcagcaatatggcatctatcatttcctggagaaagcagatgaggtaccatctctaaaagattctatatattatcaactggaaagcggagaaatggcaaaaggaaattatttaggttcacctgccttggctatgaatgtattagggaagcaagcaaaaaggtttgtattctttgatttagaaaagagtgcactggagaatgtgggtacctatgccaaacaaatcgaattaagtgcctctgtagagatacatcatgccgactcttcgagaggtaccatagagctactgccttcacttcccacatcctctttcatccatatcgatccttacgaaatagacaagaaaggagattctggagtaacctatctcgatgtcctgatacaggctaccctattaggaatgaagtgtttattatggtatggattcatgaccggagatgataaagcatctttggacaactatattacatccagtctggaaaaggcaggtatcaaagattacacaggtgtagagcttaccatgaattcaataaggaaagacagtgtattatgtaatcccggcattttgggaagtggtattctggcgacaaacgtatcacaagcgtccaaagatattatccttgattacagtaatcaactggttgatatatacaaagatgctaaatacaaagattatgatgggagtttatatattcagcatctttgatatcaacttattaacaattttgttttaatccatctactatcaatcagtatcctcctcccaatgcatgataaagattaataactccctgtatttcatcaaaacgattggaagcgacagataattctgcctgcaaaagagtctgacgggcagtaagtacttccaggtagttttgcgaactgtgccgcatcaacagttcggaactacgcactgcggactgaagcgaagtgacctgctgtttggagagtgccaaacggccttgagccttctgccattgcaccaacgcatcgtttacttccgttcctgcatcaagcaaactttggcggaaggtgagtaacgcctcttcctgttgtgctttcgctattttcaaattagcaatattctgtccgcgattgaaaagtggctgaaccaatgagccgacagcggaaagcagccactgtccgggattggttatagcgccacctgccgagtttgtccatcctgcggaaccacccaaggtgatagagggataaaaagcagaacgtgcctgattcgttgcataaaaagccccagccagttcagcttccttttgacgaatatccggacgacggtgcaacagttgcaacggcactccggttgaaagggattccgggaaacgctggttgtcaagcgtagaacgtgttatcagctgcggagccatacccaacagggcggaaagagaattctccatttcactgatttgctgttcaatagaaagcacggaagcatctaccgatagtttgctcgcttctgtttgggcaacagccatttccgtagtttgcccggctcttttcaatgctttcattgcacgcaggttctcatcccatgtttcagccgtgcgacgggtgatatccagttgcttatcaagcatcaataaggtgtagtaactattggcaatcgttgctaccagttgcgtctgtaccgcttgcctataggcttcactctgttcgagggcggctttggctcctcgtttggcattggtcaactttccgaaaatatccagttcccagtctgccgatgctgccagatcataggtcttggaagttttcgaaccatccacgctgctcaatgttccttgcggagtgagcgatacagaaggcagataagccaacttggaagaaagcagtaatgcttctacttctttcactttcaaacgggcaatattcaaatcggtattattcgcgatacccgtttcaatcagttgttgcagttgcggatcgctaaatagttccttccatgaaagggaagcaatggaagcggtatcccccgcaacaaccggctgccggtaaagactgtcggtaaccgtcgtgtccggacgttcataagtccggtacacatgacaaccgctcaatccggccgacaggaataaacatattattatctttttcatacacttcaacaattaaagattctccaactctgccggtttacgtgccggcatctgtttttcctgaagatactggaacacgataaacaatacaggtacgataaacaacagggcaaccgtaccgatcaacattccacctacggttcctacaccgatggaaatattaccgttcgctcctactcccgatgcaaacatcatcggtaacataccgaatatcatcgtaagagatgtcatcaggattggacgcagacggacttgcgcagccgaaacagccgcctgtgtgatcgtcattccctgacgacggcgctcggaagcatattccgtaagcagaatagctgtcttcgacaacaagccaatcagcataatcaaacctgtctgtaaatagatattattctccaggccgaacatcttggcaaaaaggaaacttccggcaagtccgaatggtacggaaagaatcactgcaatcggaatgaacaagctttcgtagagcgcacaaagaataagatagataaagactacacagatgataaataccagtgttgtggtattccctgtagaggattcttcacgtgacatacctccgaactcaaagccataacctgccggtaatacctgttccgcaacttcacgtaccacctgaatagcttgtccggaactgtaaccgtctgccggagcaccattgacggagatggcagagaacaaattgaaacgcgtcagcgactctgcaccgtagactcgtgtcaaagtgagatactgactgacaggggacatctctccgtcggaattgcggacaaacatattattcaatgcttcagtatccagacggaattccggtgaagcctgtaccattacacggtaaagtttagagaaacggttcatattggatgcatagttaccaccgatatagccggacaaagtgctcaatacatccgaaggcgacactccattccgcttgcaaagggcggcatccacttctaccaggtattgagggtatttcgtatcgaacgaagtcgaggcacgtccgatttcaggccgggcattcaacgcgtcaatcatctgacgggtgtatttcagcaaatcttctaccgaaccgcctttctggtcctgaatataaatctcaaaaccactacttactccatacccgggaatcatcggttgtgcaaaggccataatctgtgcagaagaaatgtcatccgtacgccgataaatctcgttaataacagcattgataccgtcttccttttccgtacgttcatcccatggtttcagacggacgataaacataccgtttgatgctccctgaccacttatcataccgttacccgtcattttagagaacattctgatttgcggtatgtcatggatacgcttgtctatttcatccattacaatcttggtttcttccagactatttccgggtgaagtacgcacatctacaaagatagttcccatatcctcttgaggaaccaacccggtcttggtggttttcatcagaaggaacaatcctgcacaagcgactaacagcaatgctcccgccagccatttacgtttcaacatgaaaaatacgccactcttatatttcagtactaaccgatgaaaagcactatcaaatgccatatggaaacgggatgagaaactcaatttctcccctttcgcagcctccatgtgcggtgtcattatcagtgcgcagagagcgggacttaaagttaacgcgttaatcagagatattgctacggcaacagccatggtcagtccgaactgggtatagaacgttccggtagttcctcccataaaacatacgggaataaatactgccatgaagacaaaggtggtagttaccagtgccgaggtgatgccacccatggcatcaatggtggcccggtaagccgatttatatccctcgtcgaactttgcctgtaccgcctccaccacaacaatagcatcatccaccaccgttccgataactaataccagtgcaaacaacgtcaacatattcagactgaaacctgcggcatagagaaaagcaaaagtacccacaagggaaacgatgatagaaatggccggaataaacgtagaccgcaaactttgcaggaaaacgtaaaccacaagtaccactaacagaatggcttcaatcaaggtttttatcacattcttaatggatgcatccaaaaactctttcgaactcatcaggtctaccagctccattcctttaggtaatccttgagcaatttccgctgtcaccttatctatttccttaataatctcattggcgttcgaaccggaagtctgcgcaatcatacagttggaaccgggatgcccgttcacttcaccgatgtacgtataagagctggcacccaattcgatacgtgctacatctttcagccgcagcacctcacctcctgcctgcgaacggattaccagatttccataatctttttcttcttcataacgtccacgatatttcaatacatactgaaaagtattcttcgattcagcaccaagcgttcctgtaggagcttccagattctgttcgtcaagtaccgtcgtgatgtcggacggaaccagtccatatttggccatcttagccggatcgagccagatacgtaacgaatagtccgctcccatcacattcacctcacctaccccggcaatacgtgaaagacggggctcgatattgatcttcagatagttattcagaaaactttcatcgaacgtgttgtcgggactatacaatgccaatgctttgatattacttgtctggcgcttacggacagtgataccgctgcgggtgacttctgccggtaataatccttgtgccgtagcaatacggttctgcacgttaactgtcgccatatcggggtcagtcccctgacggaagtaaatggttattctcgctgaaccgttattggtagaggaagaggtcatgtacatcatattctctactccattgagcgcttcttccaatggcacgactacactcttctgtactgtttccgcattagcaccggtataggtagcggaaacgctgacggtaggaggtgcaatttcaggaaactgttcaacgggaagctgcgaaagtcctatcaatccgatgataagaaaaacgaccgaaattactcctgcgagaataggccggtctataaatgttctgattttcataacggcatcttattctttagtcggatcactcttgattactgttccctcacgcaccagtccggcaccctcggctataataacatcacccggtgcaagccctgtttcgacgatgtattcagtaccgttattcaaccggaacacttctaccggggttgatttcgctttgccgtcgactactttatatacaaatatacgattctgcaattcgtaagtagctgcctgcggaatgatgatacctcctttctttatggtaggaacaacgactttaccacttccaccgttacgcaggaactggtcggggttgacaaaaacagcccgcagcccaacagcaccggttccttcatccaccgtaccgctgatagcatctacctttccgacatgggaataagtttttccattgctcatagtcagttccacttcgtccatgttttctatcgcttttttaagtgaaccatactgttgcacaaagtcgagtatttgattctccgtcatggagaaataggcatatacttcgctatcgtccgaaacagtgactaacggctcggtgatactgctgttcaccaacgcccctacacgataaggaatcatgctggctactccgttcaccgggctttttacttcagtataagaaaggtcattgcgcgcattcacttcctgtgctttagcctgtgccaatgctgcttctgccgccgcttgttcattgcgggctgtttgcagatcgaattcggacacaatctgttctttgtaaagttcagctttgctatccgctgtcaatttagcagtggcaagcttggcttccgcgctttttacattagccactgctgtttccaacgctgctttataaggaacctggtcgataatgaaaagtgtctgccctttatgaacgggatctccttcattgatacatatccgggtaattataccactcacctgcggacgaatttcaacatactgccgccctcgtagcgtagctgtataatcggatttcaaaatctggtcactttgtgttacggtaagtgttttgtacgtggcatctgcctctttctgttgcgaacctccacaagcacatagcagaggcaaacaaaccaaggcaaaaatgattagttgtttcattgtagctatatttaaatgattgttaatgatttataacccattattctataaaaagcgcgactgaccaaatctaagaattatcaaacaataaaataagaatgtagtgacgaacagcaagaatatgatgacgaacggcaaaagggaatgcttggggtttcagaacaatcttttatctttgcaaagaagtgagaaaatatacttccgggagttaaacgagcaatgagaagaatatgaaacgtactaatatacctgtttacatcgacttgcttttctgtctggtaatcatgccgcccatcatcatgttagtgccggtagacaaatggattgtacaccacacagtctttatgctgaccctgattgcctatctctacggtctgtacttcatctaccgtaaagtgaaactaccgatgcttttcatgcaacggaagttcggacatatcttattgctcatgttatcgcttatctttatcacatggttgctaacccactttccatatccaccggaacccaaccatatagacccgatgatgcataaagcccggcagcacatgcgggcgcaaactgtgtggttctttttcctggtagtgacggggttcagtctttccatagaactgatctttgaacttttccggcaaattctttccaaacaggagattgaagcggaaaagaacaaggcggaactggctctctacaaggcgcaaatcaatccgcacttccttttcaatacattgaacgccctctacggactggtacttacgaagtcggacaaaacagaatccgcctttatcaagttttccaatatcctgaaatatatgtatgcccaaactacttctgatctgatttccatcagcaatgaagtagaatatatacgccaatatgttgatttacaatctttgcgtttaaacaagcatacgaaagtggtatttgaaaccgagatggatgacgaacagatacagattcctccgatgattctcattacttttgtcgagaacagtttcaaatacggtgtttcgtccgacacggactgtactatttttattcgtatcatcgtaaaggaagggcagcttatcttcgaaaccgagaatatgattatgaaggagaaccatcaaaatcctcatgccatcggaatagacaattgccgtaaacggctggaacttctttatcccaaccgctttgtattgcttacaaaagaagaaaacggatacttcaaaacctatcttaacattcaactacgatgaaaaagctgacttgtatcgctattgacgacgaaccgattgcattgctcatcatcagccagttttgcgaacgaaaaggcggactggaacttactactttcagcgaatcgctgaccgggctgaaggaaatagcccggtgcaaacctgatctggtctttctggatattgaaatgaacagcatcagcggattggatattgcccatgcacttcctcccgagagttgtctcatctttacgacagcccatgcacagtatgcactggacggcttcgacctcgatgccgtggattttctgcacaagcccttcgcttatgaacgatttgaaaaagcagtggagaaagcgattgtttttattgaagcacgccagaacaaactaccggaaaacatcataatcaaacaagaatacaataatatatctattcctatctccgatattctttatatcgaagcaatggagaattatacgaaaatattccgtataaacggcaactatatattatcgcgcacaagtctgaaaagtattcaggagatgttacccgaaaaggcttttctacgtacacaccgctcgtatatcattccggttaataaggtggaacgattttctaaacgggaaataaacctgaccggatgccggattgtaatccccataggaagacaatacgcagaaaatgtctatgctacattgacggccaggaatatggtgctataaacaagcttacagaaagccggagcttttaaaatcaacttccgcccttctgggtataaattaatttatctctttggcttattgtccacaagccatctatcagtcgtacatttttcgtatcatcgtcctccacgttccacgcataacctcccgaaggcaggctacgtctctccaatatttcattgggctgattattggaaaagaaaagttccagctgtgtagaatcgggactaaaaacaatgaaagcagaagtgtcactatcatccaccgcctctgtacgaatccctttctcaaacaagcggatacagtctttttgcacttcacaccatacgtatccggcagaaccgatacagccatgttcatcccggtcacctcctacaagcggagattgcggatactgaactaatttggtagccggcatccccggtgtatattttcctgtataaaacacttccagcgtatcattcagaagtaaaccgttgacttcttctttatttgcatccatcgtactgaatgaaagggtatcattcttatcggtgacaatcgttaccgtattcatggttgcatcacttacaattcctttagaactactcactttcgacgagcaacctgccatgaggcacagagtacctaccgctaatagcattgttttcattttctttaaattttgctttattttaaattaatgcaaagataaaggttatacaccaatatcccgtttctacaaaataaattaatttcgggacagtttgttcagttgcactatctaaaatgcctatattggacaacgatctattagaaattcagtctacctttgtgatgtagataatcaaaagtaaatacagaatgccatgaaagaaacttttcaaatcccaactcccgaaacactggaagccttgacaggtaaggaactttatgatctatggacttcacttcaccaacttatcgaacagaaatacaatatggaacaaatgtggaatcatggagggaaaaaatggacttacgaatacaaatatcgcagaggcggaaaaactctatgtgccctatacgccaaagaacaaacgattgggttcatggttattttaggtaaagatgaacgcactaaattcgaatccatgcgagaaatgttctccaatgcggctcaaaagatatatgatgagacgaccactttccatgatgggaagtggcttatgttcgaattaaaagatacttctttatttaatgatatagagcggctcctatctatcaaacgaaaacccaatcgatgattgaatcagaaataaataagaggtattgtcaaagttgcgggatgcctctccgctttgatgtagagaaatatctgggtactaactctgacggttcgcgaagtgacgaatattgctattactgcctgaaagacggaaaatatatcgtcgacattccgatgtcggaaatgattaatatctggataaaatacaccgacaagtacaatgaatatgcagatactgcttattcgccggaggaacttaggcacatactaaacgaacggttacccaatctgaaacggtggaaacaaaagttggaaacctgtaatatccatcatcagaagattcaggatataatcgtttatatcaataatcatttattcgacactttggatacagacatgcttagcacgataagcggactttccaaatatcacttcagaagagtgtttcaaactgttgccagagaaaatatcggaagctatatacagcgtttacgtctcgaacatatagcacatttgttagtatccaccgagtttacattaaatcagatttcggaacagacaaactatcagaccaaatttagtctagccaaagccttcaaaaaacattttggcgtatcgacctctcaatatagagagaagtacaagccgatgtatgatgagcaacatgcggttatcactcctgaaatccggtcgattctgccaatgaaagtattttgtatcgaggttggtgaaaaatacaaagatgagctccgatacaaattaatatggaacagactgaccaattacgctaagcagcataatgaagaaaagttgaattataagtttgtcagccttagtatggatgacccgtccataactcccatgaataaatgccgcttctatctcggggtgacaattgatgccactgaaaatgattcgcaaccgggagtgatggaagttcccggtggacgttatgctgtattcaggcatatcggagactactctttgttgcataagttctaccggactatttatgaagagtggtttccggaaagtaaatatcgccctcaaagtactttcagttttgagatgtatatgaaccgtcccacctctactcttagaacagaattaatgaccgacatttatattccggtcacaaagaaataagaaattatcaacactctaaaacaatgcattatgggaaaggtttcagaaatcatgctattgaaacaaccgaagcaatccgctttggctgttgaagtacacacggatatgaacggaatgtcagaggctatcgggaagaacttcgtaaaaatagactctttatttaaggcacaaggcgaaatcactactgatattccttatgtcgagtatcccgactttgagagcctgactgaacacaatataaaaatgattattggtctaaaatcatccagagagttacagggtgaaggggatatacgatctataacgataccggaaagaaaaatagtttcctgtctgcatagaggaacttacagtgaactggctgttctgtacaatgaaatgatggaatggataaaaaacaacggttacaaaccttcgggaacatccatagaatattattacagcaatcccaacgtacccgaagaagaacaggtgacgagaatagaaatgccactattatgaatgtttatttcatcatgcagattcttcctaagctccaattattattatttgattcaaaacggaaataagccaaacggtacagaaaaaaaatcaaatgtattgcttgtaaagcatcgccaaagattctccgtcaacatgctgtttttatttgtttctttacctgatatgattaacttcgatacctacttttatttcgttccactactgtttcctttgcgttccactatagtgttccgcaagggagactatagttattcttgcggaacactatagtggaacgaagtaatagtagcaaatgatgtaaatccggataggcaagcaattattaaaaaatgaccgaatgaattatttgcaatcaaacaacaacagatacagacatcatttttgtatctttgccaagtacagaataaacatgaaaagagaaatcctatatcaaaagatagccggcactatcgcctggcaaataaaaacaggtatatggaaagcaggcgagaaattaccttctttacgtactatcagcaatgaatatggtgtaagtttaaacacagccattcaggtatattatgaattggaaaaggaaggattcatcatttcccgccccaaatcagggtacattgtcaattataagccactaaatttgtctgcgccggcaacaacacagccttccgctcaagaaaggaagaggccgacttaatcatggaagtatatcattccatcgaagactcgtccatcacccgtttctcactgggaataccggaagatgttctattgcctatcgcaaagctcaataaagaattaatcaaggcaatgtattcacttccgggaagcggtaccaggtatgaagacccgcagggaaatattcggttaagaaactatattgcccgttttgcatatagctggaatggaaatctgactgaagatgatattgtcactaccacgggagtgaccaattccatctctttagcattatccgtcattgcccgaaaaggagatacgatagctgttgaaagtcctgtttatttcggcatattgcagttggccaacagcatgggactccgggtgttggaactgcccaccaatcctgtaacaggtattgagcccgatgctttaagaaaagtattgccacagattaatctatgcctgcttatcagtaatttcagtaatccactgggaagttgtatgcccgacgagcataagaaagaggtagtgcagatgttggcagaatataatattcctctgattgaagatgatttatacggtgatgtattcttcagacattcacgccctaagccatgtaaagctttcgatgaaaaggggcttgtgttatggtgtggctctgtatcaaagacattagctcccggttaccgggtaggctggattgcccccggtaaatttaaggatgccgttattcgccaaaaacatattcatttaatatccacccctaccctcaatcaggaggctattgccaactttatggaaaaggcagatatgagaatcatttacgcaggttgcgccatgaattacattccaacagtcttcatctggcacaatctattacctactatttccccgaagacactaaaatcataactccgcagggaggtttcatgctttgggtggaactaaacaaaaagattgataccacagaattatattacaaagccatgcaacacaagatcagcattgctcccggacgcatgtttacactgcacgaccagtacagaaactgtatgcgtttgagcttcggtcagcaatggagtccttttatcgaagaacgcttgcaggttttaggaagcgttatcaaagaatcattctgattggcggatatactcctttaccacctctccgagagtcttcagccctttctctattttgtcttcaggcatattggagtagtttattctaagcgtattttccttgttgccattcggataaaaagaacctcccggaacaaaagcaatctttttctccagacttctgactaaaacttcgcgtgctgaaatccccacaggaagttctatccaggtaaatagtccgccttcgggacgagtaaactttattgtatccggaaaataacgttctatactttcaatcgcaacattcctgcgctttctatatacttcgactatttttgcaatatgtttatcaatatcataccgcttcagatattcggcaatggtcatctgggcaatagtgttgcattgtaaatccgtaccttgcttgactaatacatatttacggataatatctttatcccccgcaatccagccaatccggaagccgggacagaatattttcgaaaaactgcctgtacacaagatatttccagcctcatcaaaagactttatagacggcaaaggttctccctcaaatcttaactcgccatacggattatcctcaataactgcaacaccgtatttggcagataattcagccaatttcctgcgtctttccagactccacgtttttcctgtaggattctgaaaggtaggtatggcatatatcagttttatatgcagagtgttactcaaaacatcttccaaaacgtccatcatcatcccttcctcatccgtgggaatttcaataaagctacacccatacgctttgaatgcgctaatcgcagccaaataggttgggctttcacaaagcacgacatctccttcgtccaaaaagacttttccggacaagtccaacccttgttgcgaaccatgggttatcaaaatattgtctttatcgaaagcggtgcccaaacgcccgttcatccggttggcaatccattcccgcaaaggagcataaccttccgttgtggtatattgaagtgcttttgtacctgcttctttcaatacgatctgattgatctcattgatttcatctattggaaaaagttccggagcaggcagaccaccagcaaacgaaatcacatcttcctgttcagtcacttttaatatctctcttatttccgaagcctttatataagacattcttttagcaaaattcaacttcataacctttaagtatattaggagattaaaacaacactgcaaagtaaagcaaaaaagaaagacgagaacagatacacttttttatatattgacaggtacagatgagggagttttcaaaggatagctatatgaagttaatctcccatattacttatttcgtcatgaggaatcagggcgttcgtcgaataatcctatacagaaccctgtttaaacttacctttgcacagaaaacaaaagtaatcgatagcaactatggaagagcaaatactaatttttcgcacctcggtaaagaatgtacgggatatcaaacatatcgcagcgctgttcaccctatgtccccaaatctacaaatggaatgtagatatggaggactaggaaaaagtgttgagaatagaatgtcagggaatcaccccgactgaaatatcaaaggcattacgcgctatcaacatttatgcgcaggaactggaatgaaggggcaatgcgccccttaataaattcaccatccacctttttcattttcactcttcaatcattaattccatctgtatgtctcctctttcataagtcgtgtgatattcgggaagttccttgaagcccaacttatgataaatatggatagccggtttcagacgcgtattgctctctataaagattcttttaccaccaagctccttcgctttatttacaactgcttcgcaaagcagtactccaatacctttgccctgaaccttagggctgacagccagtttggccaactcataatcataaagcggatgatccatcttacacaaagcacatacaccgaccggctcatctttataaagagccaccaaaatagctcctcccttatccagaatatattcctttggatgatccaaagccttgtaatcggcctcttccatccgaaaataagcagttatccactcttcgttaagggtccggaaggcagattgatagcaaggttcataaggaactattttgatgtccttactctctcgttcctttttcgcttccttcacccgctccaacagggatttatccaacaaaagattctcccattcttcgatagcctcccaaaggtcattccgggtttgctgcgtgatttgctcaatagctgccgtaacatctatacactgttccgaaaaagagtcggacattctttttcctttggcagataacatgaccatgtttcttctcccgtcggatttgtcctttgtctccttcactaatcctttagctaccatttctttaataatattactcacggaaggatgagaatgaccaatctctttggctatggacgtaatggtttttgcctccccacgtgataatacaaaaaatacaggaaaccatttcggtttgaggtctactccaaacattttatagatggcggctgcatctactgttattttatcggtcaacatgcgtaatctgctaccgatggctaatttgcctgtctgattaaaaaagtccatgtttttattagttgcgtcactaaatacgtaattgattacgcaaatatattagctttttataatatgaacaaacatttttcgcaaaaatacgtaagccgttacataattagttatatttatggataaacatcaggaaatttagcttatgtgcaaagtgctcctttggatttttcccaatattttggggaactgccagaagaacaacaaagtacaacaaattgccgctgtcgcatcggatattgcttcagccgcatatacaccggctactcccataaaatgtggcaatattaatgccaatgggatcaataggattgctttgcgcaacaaggctatgaaaatagaaatttttgcttgtcccaaggctacaaacatattttggcaggctcgttgcaatccgaaaatagtcataccacccaagaaaacaggcattgcccagcggactgtttctatcaatctttcatcactcgtaaaggcggaagctactgttgaggggaaaagaatcataaacaacatcagcagtaagttgaatgagaacatggttatcaatgcgacacggaaacagtctttgacgcgttgtttatcgccgtgcccataattataactcacaataggaacgaacccttgcgcaaatcctgttaatgggacacttgcaaattgcatcgcactttgcaagatggtcaatgcgctgacataaatatctccaaaatctttcaggctgctgttcagaacaaagccgaccaggctttcggtacttgccataataaacggtgatacgcccaaagcaaatatagaaagtattatttcccggttcaacgccatataacgtttttctaaagggagagaggcgtgccgggagaaaaggaaagttaaaacccacactgcactacatgcctgtgaaagcactgtagccagagctgcaccttttactcccatatcgagccaaaaaatgaaaatcgggtcgaggacgatattcaacagtgctcctattaataccgagtacatggcgatagcaggacgcccttgtgcattgataaaagaatttaatcctgtggatatttctacgaagatagttcctaataaatagatagaaagatagttgactgcatactccaatgtattttctgaagctcctgtaaagagtagaatcggctccataaaggtatatgcgatgagagaagtaaacaaggtaaatagtattaacaggataaagccattacccagaatttttccggcacgtgaacgatccccctgtccgagtgcgatagccgctaacggcgcaccgccacctcctactatcgctgaaaaagaagaaatcagtataacaagagaagtcgttactcctacacccgccaatgcatccgtaccaatcccagggatatgaccaatataaatacggtcgaccatgctataaagcaaattaacaaattgcgctgccacagccggaagtgccatcttaaaaacaagcggtaacatgcgctctgtccccagtcgttcttcatatttatttatcatcccaaacttctttttctaaaatcagttgcaaagttataagaaaaacaggcttccgatttaaaaccattggataaaataaatataatacatcagttatctccgtgtaagaaatccatagatatactgattgataaggttgtgttgttcttccgttccattctcccccatattactatgcgttattccgtccaatttcacaaccttcatccggaattgttcctgctccttttcagtgggtaatactcctgaatccgcatcataatcgcatcctcttaacgtataaagtcgaggattccgtgttctaggcattatcattctgcgatgatccatagatatggctttatttatcaactgcggatatcgggtagcaaataacatggtcatatctccgccattggaatgtcctatcaatataaagtcattccaatttaattgtggcttcaatttcttaaattcctgaatagtaaaaagaatatttgccactcccctttcccaatttggcatgcgtgtttccatgaaattaccttccatggccaaaagaggatcatctgccaattcatgttgtatgcttattacgtaaaagcctttctgggaaaggaatcgtgttagataggcataagtctgattggacttattatttttatttccatcgtagccgtggctaaatataatgacttttgttttcgaattcactttgtgcggctgatagacggctagcggtatcactctgtttcttgaagcatcaaaaaggcaagtcgaaaactctatttgtgagaaacaagagagtgctgataataaaagaacaaatacaataattagtttcttcatgtctatgatgtgatatttattattctataaatctaagagcaactgaattataacaatgaatgcataatgtaaggaagggattataaaatgattttctcataaagtttgaaccactctaaaccgtaatgacccaatcctaaatctacggtatcaatgtattcgaacccacacttttcgtacaatgaaatagccggaagatttttctcgtaaacatctaaccgcacagactttatccccgaactttgagccaattccaatgaataatccattaatgcatgccctactcctattttcaaaaaagaaggatgtacaacaaaagtatgtatcacaaagatatgactatagtccagttctattttccatttgacattctcataagccttttccggttgatgatttaaaatgactgaaccgacaattcttccatcatatcttgctacgtaaagcgtttcatcatttacaccggcaaccgcatcttcccgaacaggataaacaccttttatccacccgggataattagtcgtagcagccagataatcattcagttcatcatacagcttttccagttcatctatatcagcagaagttccgggctctattgtaaatttcatatatacacactgtttatctttttatcagttcttcaatctttccacctgtaatataaggtatacattcggatatcttctcaatactccaatcccaccattgcaatttctgcaattggacaatcgtattctcatcaaaacgcttccggatttctttggctggtgtcccacctactatcgtataaggaggaacatctttagtaaccactgcccgcgacgcaataaccgctccatctccgatatgaactcctgccatgataacagcttcatatccaatccagacatcattacctattactatatcccctttattatcccaagcagaagttacatctcctttatctaaattccattcctcaaaaaagataggaaacgtataattggataaagaacccaatgtgtggtttgcgctgttaaaaagaaatttggctccacaagcaatggaacagaatttgccaattatcaatcggtctttattaatcggataatgatataatacattgttcttctcaaaaagaacaggatcatttacaaagtcattgtatattgtataatcacctaccataatggcaggattcttaatcactgtattcagataaacagtctggaaatcattggtgcgaggatatgtttttgaattcattgtgtcagcagaagaggatttatattacatagcaaatatacaagataaatttcagactatcacacaacgaactaaatatgtatcccatattgatgcttcacttcagccattacaaacgtgctttccagtgatcctaagctatcaatcgtccccaacacattcagaataaactcctgatagtatttcatattgggagcatgaatcttcaacaggtaatcataacttcctgatatgttataacattcggttacttcaggaatatcctgtataatccgtgtaaactcggctgctatatccctgttcagacgtctaagcttcacactgcagaatacgacaaatccctgattcagcttttccgcatccaatacggcaatatacttctttatatatcctccactctccaaccgtttaagacgttcaaaaacaggagttgaagaaaggctcacccgtgcagccaactcttttgtcgtcaatcgggcgttttcttgcaaagtacggagtatttgcaaatcgactctatccagtttatcaaaagtatccataagaaaaatattcttctaaaaggtgatttctaggaatagcacagttatattattccatataatggcacaaaaatagcattattttctatattttagatatatattgttcgatatatcttcatccaataactttgcaagaaaataaagaaagaatattaaacttaaaaaatatacgattatggcaacaaagaatttacatttcgagactttacaagttcatgtaggacaagaacaagcagatccggcaacagatgcccgtgcagtacctatttatcagactacttcttatgtatttcacaactccgctcacgcagccgcacgtttcggcctgcaggacccgggaaacatctacggtcgtctgaccaactccactcaaggagtttttgaacaacgcgtagccgctcttgaaggaggagtagcagggctggcagttgcttcgggtgccgctgctatcacttatgctttcgagaacatcactcgtgcaggcgaccatattgtggcagccaaaactatttatggaggaagctataacttactggctcataccttacccagttatggcatcacaacaacattcgttgatccaagtgatttatcgaactttgaaaaagccattcaggaaaatacgaaagccgtatttatcgagacattgggaaatccgaactcaaatatcattgatatagaggcagtagctgaaatagcccaccgccacaaaatacctttgattattgacaacacatttggtaccccgtatttaatccgccctatcgaacacggagcagatatcgtagtacattccgcaacaaaattcattggcggacacggttcgtcattaggaggagtcattgtagattcgggcaaattcgactgggtagcttccggcaaatttccacaactaaccgaacctgatccatgctatcatggcgtacgcttcgttgatgcagccggtccggctgcctatgccatccgtatccgggctattctgctgcgcgacacaggtgccaccatcagtccattcaacgcttttatcctgttgcaaggcttggaaactctttccttgcgcgtagaacgccatgtagaaaatgcattgaaggtagtgaatttcttaaacaatcatccgaaagtgaagaaagtgaaccatccgtcattatccaatcatcctgaccatgcactgtatcaacgttacttcccgaatggtgccggttccatttttactttcgaggtaaaaggcggacaagaggaagcacaccgcttcatcgacagcctggagattttctccctgcttgccaatgttgccgatgtgaaatcattggtgatccacccggcaagcactacccattcacagctcaatgcacaggaactcgccgaacaggagatttatccgggcaccgtacgtttatcaattggaacggaacatattgatgacctgattgcggatttggatcaggcgcttgccaaaatctaacattcaatcattgaactttccatgactgcaagatgttatacctatataacattaaaaacattgcagtcatggaaaaatatttaatacacagcaacgaactgcatctgatagacgcagagaaaatccatcaagccgtagaaaagatggtggaatcactcgatttagccgcaggatcaaccactaacttcgatctctatcaggttgtggaaaactactttaaagatctcgagaaaaggagaaaaattaatcatgtactgggaatcaaagaagatagatatgaactagccgaagatttcggtataaaataaaaaagagatttattcaatcacaccagacaagttttccaaaaaataagggagttgcacgttaagtacaactcccttattttttgaattatcagagtataacaatcaatttccctgatgcacagtaagctgtgggaaagggaagttgatacctttttcattgaaggtttcgtaaatagctttattggtatcgaaataaacaccccaataatctccgctatttacccatacacgtaccaccacattcacactgctggcatctagcgcatgaagagctataaacggagcaggttcattcaagatacgtttatcttcagccagaatatcacgaactatctgctgaaccttattgtaatcttccccataatctataccaataatccattctacacggcgggtttcctggtgactgtaattaatcactactccactacttaatgaaccattcggtatataaatcagtttattatccccagtagtaaggatggtatggaatatctgaatttcttttactgtaccggctgatccctgctgtgtttctatccaatcgccaactttataaggtttgaacaaaagaataaccagtccaccggcaaagttttgcagattaccggataaagccataccgacagcgacaccggcggaagccaataaagccgcaaatgaagttgtctcaactcccaaggcaccgacaacagaaatgattaacaggattgtcaacagaatattgaccagacttctaacgaaagttttgatacttacatctacttttcggttatccatcagacgcctgatgaatttgttgagcagcgagatgaggaaacgtccgacgacaaagacaaggaccgcaatcaatatacgttctccggcacgaataccgaagtctatcaattgttgagtaatcagcgaaagcttatccaatccgtcagcattggcaatcgcctctttcattaattcgtctgcagccacttgcacagagtccgcagcttgtgttgcttgcaataatagtagcataattaaatatatattaagtgaataaatgcagttttgttatttcaacaatttacaaagttatattgtttttagtgaatctaaaagttttttttgctttcctcctgcaaaagcagtatttttgtcaccgattcactggtaggggtgccttaacatgacgggctgagaacatacccatagaatctgatccgggtaatgccggcgtagagaactaattagtaagcaaaaatgaaaagaattgtatggatggccgtcgccttattgggcgcaggtatcactgttcatgcacagacgagtgcaaaggatagtatgagagtagtaaacctgcaagaggtgcaggtagtgtccacacgtgccacagccaaaactcccgtggcattcaccaatataggcaaagcagaactcaaaaaggtaaacttcggacaggatatcccctatctgctaagtatgactccttccacactgaccacatcggatgcaggagctggtatcggctatacgacacttcgcgtacgtggaaccgatggcacacgaatcaacatcacggtaaacggcataccgatgaacgatgccgaaagccataacctgttctgggtgaatatgcccgacttttcttcttccgtaaaagatatgcaggtgcagcgcggagcaggtacatcgacgaacggagcaggtgctttcggagccagtgtcaatatgcaaaccgaaggtgcatctatgaaaccatacgccgaattcaatggttcatacggttcgttcaacacgcacaaggaaacagtgaaagtgggaaccggcctactcaataaccactggacgtttgacgcccgcctttccaatatcggtacggacggatacatagaccgtgcttcggtggacttgaactcttactacctgcaaggaggttattttgcagaaaacacatctgtgaagctcattgcatttgccggaaaagaaaaaacatatcatgcttggggatacgcaacaaaagagcaaatggaaaaattcggcagacgctacaatccttgcggggaaatgtacactgatgccaacggcaaaaaatattattacgacgaccaaacagataattatctgcaaaagaattatcagcttctcttcaatcatactttctcgacagcctggaatctgaacgttgccttacattataccaaaggtgacggttattacgaagagtacaaagacggcagatacctgatagaatatggtttaaaatcatttacaatagatggaaccgaagtatctaaaagcgatttagtccgtcaaaagaagatggacaacaaattcggcggcggcgttttttctctcaattacacagccaacaggctaagtgcatccctgggcggcggattaaatcaataccggggcaataacttcggaagagttccctgggtgaaaaactacgtaggttctctatctcccgaccatgaatattaccgcaacaaatccaagaagaccgatggaaatatttatctgaaagcgaactacgatcttactagaggactaagtgcttatgccgatctccagtatcgccacatcaactataccatcgacggaaacaatgataaatatgactggagtaagaatgcgctgcgtccactggcagtagataaaaagttcgatttctttaatccgaaagtaggattaaactggaacatcacttccaaccatcgtgtctattcctctttctcggttgctcaaaaagagccaacaagaaacaattatacggatggtgatccggactcgtaccccaaagcagaaaagctgctcgactatgaagcaggatataccttcgccaaccaatggctgacagcaggtgcaaacttctactacatggactataccgaccaactggttctgaccggagccttaaacgatataggtgaagcactgaccgaaaacgtgccggacagttatcgcatgggaatcgaaatcatgctgggaatcaaaccgtgcaaatggtttcaatgggatatcaacgctacatggagcaaaaaccgtattcaggatttcgtagagagcctgccgggctaccactataatgacgacggtagctctacttctctcccgactattcagataaagcataaagacactcacattgctttctcaccggacttcttactcaacaatcgtttctcattcaattataagggattcgaagctgccctgcaatcacagttcgtgagcaaacagtatatgacaaacgcagaagttgaagaactgactcttgataagtattttgtcagcaacctcaatctggcgtacagcttccgtcccaagaaagtactgaaagaagtcaccataggatttactgtatacaatctgtttaatgaaaaatatgaaaacaacggctgggcatcaagtgactacaccgatacgctggaaaatcggggaaactatgccggatatgcagctcaagcaggaacaaacgttatgggacatgtttctttccgcttttaatcacacagagttatggaattgaattttctggaaatattcggtacgattgtcgggctagtctacctttggttagagtaccgggcaagtatctacctttggatagcgggtattgtgatgcctgccatctacatcttcgtatattacaaagccggattgtatgctgactttggcatcaatatctactacctgatagctgccatctacggctggttcttctggatgtggggacacaggaaaaagaaaggtcaactgacgacagcagatgcttcaaccggtgacacccctaaagatcttcctatcgtacatactccgggaaaatgttacttgcctctttttctggtattcgtcgtttctttcctcggtattgcatggatactgatagcatatacggatagcaatgttccctggctagatagctttactaccgcattgagcattgtcggtatgtggatgctggcacgcaaatacgtcgagcaatggtttgcctggatttttgtggatattgtctgctgcggactttatatctacaaagacctttattttacttccgctttatacggactttactccattatagctatctttggctactttaagtggaaaaaattaatgagcatacaatgaaatacgaacactatactcccgaagccgtgatacttgccaatggcgaatatcccagccatcctcttcccctgcaaatgctggaaaatgcagaatttgtagtttgctgtgacggggctgccaatgaatatatcctgcgtgggcatacccccgatgtaattatcggtgacggggattctctttccccggaatataaagaacttttctcccctattgtacatcagatagcggatcaagaaacgaacgaccaaaccaaagccgttcatttcctgcaaaagaaaggattccggagaattgccatcgtcggagccaccggcaaacgggaagatcatacgttaggaaacatcagtctgctgatcgactacatgaaagatggtatcgaggtacgtaccattaccgattatggtatgtttatccccgccaaagacacgcaaaccttcgcctctcatccggggcaacaagtttctattttcaatttcggagcgaaaggattgcaaggagagggattagtttatcctcttagtgattttactaattggtggcaaggaacgcttaatgaagcaacagcaaatgagtttactgttcattgtacgggagaatatttagtattcttagcttctatataaactatattgcaattatccggtttatgccaccctattgtcacaattgtgccaccttgttggcacgaccgtgacacttcgatggcacaaccgtgccaacaaggtggcacaaattcattcataggaagaagaggattaaagcgtcaacaaatacttcttgaagtccgcaaagtcttttgtcatttgaaggctttttttctcgcctttcataaattcctgcaatttggcagggatttctaccgcttctccaataatgctttccactgtttcgaggaacttggcaggatgagccgtttcaaggaatacacctgtttctccctctttcaagccttctaccaacgcacgatatccacaagcaccatgaggatcaaggagataatgatgttctttccaggtttccttcaccgtttcgcggatttgctcatcggtataagttgttcctgaaatctcggcagagatatcagcatgtgaaccactatataaatcgagtacgcgggcaaagttactcggatcgcctacgtccatagcattagcaatcgttgcgatagacggacggggattatatttacctgtctgcagatattgatagaaaatatcgttgcggttattagcagcaatgaaacgcttcacgggtaaacccatcttcttgccaaacaatccggcggtgatatttccgaagtttccactaggtacacagattacagcattatcagcttttccggcacgtttcaattgtgcataagcatagaaataatagaatgcctgcggcaagaaacgggctacattgatggagttggcagaagtcaacgaaaggtgttcattcaattctttatccatgaaagcagatttcaccaatgcctgacaatcatcaaatgttccgtccacttcaagcgcagtaatattctgtccgagcgtagtgaattgcttctcctgtatttcgctcacttttcctttcggataaagcacatacacatgaataccttccacacccagaaagccgttggcaacagcacttcccgtatcaccggaagtagctaccaatacattgacattcttttgtccttcttttttaatgaagtatcccaaaagacgcgccatgaaacgaccgcctacatctttaaatgctaacgtcggtccgtggaaaagttcaagtgaatagatgttatctgccaccttaaccaaaggtacatcgaaacttaatgtatcatatacaatctgtttcagcgtatcggcaggaatatcctcaccgaagaaagcatcggctacgcgataagcaatttcctgaaaggataaactatcaatcgtatcgtaaaagtcctgtggaagaggtttgatagacataggcataaacagccctttgtcggcagcaagcccttttaccaccgcttcttgcagtgaggcaacaggtgcttgtttattcgtactataatatttcataatctgtggtgacttatttcatgaattcttttataaactcgtcttctttcagaagtccgtaactaccgttgcaagcggctatttcatcatacgtctgcacttcgtccggctcgatacccggataccagataagaaacggaatgggatcagatgtatgagtacgaagctcacagggagtaggatgatcgggcaatacagcaatggctaccggttcgtcccaatctttcactgcttcataaataggacctacggcacgtttatcaagattctcgatagtgagaagtttcaagtcgatgtctccttcgtgtccggcctcatcactggcttcgatatgcagataaacaaaatcatccgtcttcaatgcttccaaggcagcggtcactttgttttcatagttcgtattataaagtccggttgctccctctactgcgatgcgacgtaaatcagcataataaccgattccgtttatcagatcgacagccgagatgactactcctttctttacctgtgggaaagtctcggagaaagtaggcatctgcggacggtaaccggggctccagggccaaatactgttcgcaggatctttaccttctgccatacgtttcagattcaatggatgatctttcagcagttcctgtgatttcagaatcaggtcgttaatcagatctgccgtttcttgtgcttccagaaccaatggtttcaccatcaatggacggaaaggtttcaaaggtacatcatgcggaggtgtacaatccagttctttattacctcccttgataaccaatagatggcggtactgaactcctgtatgaaagcgtacgcggtcattgcccagtttttcttgcaaatattgaatcaatacatctgcttcttccgtagatatatgtccggaggagtgattcttcagaatatctccttccacacaaatcaaattacagcgcattgccatctcacccggtttcagatccacaccaatactggcagcttccagcggtccgcgaccttcatatacctttggcaaattatatcccaacacggacatattggcaacttcactacccggatggaaaccttccgccacagtaatcaggcggccgttacgtcccatgcgagctagcttatccatataaggcgtctttgcatattgcaggagcgtcttgtcccctaatgacttcactggccaatcggccattccgtctcccaatatgataatatgtttcataaggcgtttaaacatttgcgatgctcatgatgtcggcaaatactccggcagccgttacgccggcaccggcaccgtatccttgaatcatcatcggatattctttatagcgttccgtagtgagcaggataatattgttgctgccttccaagccgtagaacggatggttggctcctacttcctgcaggccgacggaggcttttccattctccagtttggcgacgaaacgccagtgcttgttttctttttccaatacctggcgacgggcttcaaagtctgcgtcgagacttggaacacgtttccagaaatcttccagagaaccttcgaagaagtcattcggaacaaagaggttcttttcaacatcttcctgttccagacggtatccggcttcacgtgccagaatcaccagtttacggatcacatcttttccactcaagtcaatacgtgggtccggttcagagtagcgttcttcctgtgccattttgatggtacggctgaaaggaatatcggcgctgattttattaaatatatagttcagtgtaccggaaagcaccgcttcaatcttcagaatcttgtcaccgctatgaatcaggtcattaattgtattgatgatcggaagacctgcacctacgtttgtttcgaacagatacttcacaccccgttggcgggcaatcgttttcagttcacgatagttttcataagcggaagaagccgcaatcttattggctgctaccacagagatattgtgttgcaggaaatctttgtaaagcgatgcgatgtcagcgctggccgtacagtctacaaatacagaattaaagatattcattccgataatctcgtcgcggatggtttgcaagctgctgtccttacccttttccaacagttcttcacggaagttggcgaggtcgaaaccttcacggctgaacattgccttggctgcatcaatgatgcctactacatggagtttcagtccgttttccatcatcagcttttgttgctggcaacgaatctgttctaccagactaccccctaccgtaccgacaccacagataaagaggttcaatacctgatattcggagaggaagaaagagtcgtggattacgttcaatgatttacgcaaggatttggaatcgaccacaaaagagatattagtttccgaagctccctgtgcacaagcgataacgttgataccattacgtcccagtgtaccgaaaagtttacctgcgatacccggtgtatgtttcatattctcacctacgatagccactgttgccagatttctttccgccagaatcggagaaatctcacccatctctatttctttcgcaaattcttcgttcagcacttcacaagccaggtcggcatcggcattacgcacaccgatagaagtactgttttccgatgaagcctgtgagacgaggaacacgctgattccattctttgccaatgctttaaaaatgcggtagtttacaccgatcacacctaccataccaagaccctgaacagtaatcagacttgtgtcgttgatggaggaaatccccttgatagccttgctctgcgggttggaaacttcttgtttgataaccgttcccactccatccgggttgaatgtattctttattataataggaatattcttgtgacatacgggatagatagtcggcggataaaccacctttgcgccgaagttacaaagttcggtcgcttctacgtaactcaattccgtaatcgtataagcagtcgaaatgacacgcggatcagccgtcataaatccgtctacgtccgtccagatttccagacttgtcgcatctagcgccgcagcaacaatggcagccgtatagtccgagccaccgcgtccgaggtttgttacatcccctgtcgttttatccgaagagatgaatcccggcaccagcgctactttaggaatagactggaaagcctctttcaccagtttattagtcaattcggtatccagcgtgtgcttgctatgctttctttccgtcttgataaaagtgcgcgaatcgaaccattttgctccctcaatcagtgcagtgacgatgatcgatgaaaggcgttcaccatagctgacgattgtatccgaagtcttcggggaaaggtctttaatcaggtaaattccctgaaagatatccttcaattcgttcagtagttcgccaatctgacgttgcaacgatacttgcttttctccggcaggaatcacctccttaatcatctccacatgacggtaaacgatttcgcggaactcaccctcataggctgaatctcccactgccgccatcttcgatgtatttatcaatttgtcagtgatgcctcccaatgcggaaacaactacaattaccggctcatttgccgactctacaattctctttacgcttaaaatgctgttcacggaacctacggatgttccgccgaatttcattactttcatgaagatacttatttaaatgcaatgtcctgcagtttgctttttacagaacgattggttgtttacgaataaaattgaatttgaattttgcctgcttatacaagcgtgaatcacgtagatacacaaaaactatccattaacccctaagggtcatggtacacatggatgtgactgtatgtggatagtacttcatcatagtccttgtttctactcttgtttttgataagtgtcgcaaaagtaataataaaaacgttcaatctatcacttttttcggtttttttctgataaaaagaatctttcgcctgcgctttatccggtcatccgccttcacttttatgacattttgttacttatttatcaaatctattattatatttgcgaaaacaatcgcacaaaatcagcttatgagcccattaaatacttccgtattgttaatatacaccggtggaacaattggtatgattgagaatgccgcgacaggtgctctggagaactttaacttcgagcaactgcaaaagtatatccccgaactgcaaaagttcaattttccaattgacacctatcagtttgatcctccgatggattcgtcggacatggaaccggatatgtggcggaagctggtacgcattattcatgacaactacaatcgttaccacggcttcgtcatcctgcacggaacggacacgatggcttataccgcttccgccctaagttttatgctggaaggactggacaaacccgtcattctcacaggctcacagcttcccatcggcgtactccgcacggacggaaaggaaaatctgatgaccagtatcgagattgccattgcacaaaacaaggaaggaaggacactggtgcccgaagtatgcatcttctttgaaaatcacctgatgcggggaaaccgtacgacaaagatgaatgcagaaaacttcaatgcattccgttctttcaattatccggtattggcggaagcgggaatccatattaaatataataatgtacaaattcacggaaatggtgaagaacgggaattgaaaccgcactatttgctggataccaatgtagtggtactgaagctctttccgggcatccaggaaaatgtaattgccaccattctggggattgaaggtttaaaggcggttgtgctcgaaacatacggttcggggaatgctccccgaaaggaatggtttatacgccggctctgtcaggccagtgaacgtggaattgtgattgtcaacgtaacacaatgcagcgcaggaatggtagaaatggaacgttacgaaacgggataccagttattgcaggcaggcgttgtctccggatatgacagtacaacggaatcggcagtcactaaattaatgttcttactgggacatggatataccccggatgaggtacgcgaccggatgaaccgttcgatagcgggagagataactctgtaggcttcatctatttctattaggcagggataacttatttctaataaattatccctatttttgtaccctacaagaagaaaggaatttcgatggcaaaagagaaaaccgtatatgtatgcagtaattgcggacaggattcacccaaatgggtgggtaaatgtccgtcgtgtggagaatggaatacgtatgttgaagaaatcgtacggaaagaacccactaaccgccgtccggtgtcgggcattgaaacacaaaagcccaagccactggcacttagcgatatagaggcagacgacgagccacgtatcaatatgcacgatgatgaactgaatcgtgtattgggaggcggacttgtacagggttctcttgtcctgataggcggcgaaccgggaatcggtaaatcgacgctcgtcatgcagaccgtactgcacatgccggaaaagaagattctttatgtatccggtgaagagagtgcacgacagctgaaacttcgtgctgaccgtctctctgacacttccagcgattgcctcatcgtttgcgagacttcactcgaacagatttatgtgcatatcaagaatacgaatcccgatttagtgattatcgactctatacagactatttccaccgaaagtatcgaatcgtctcccggaagtatagcgcaagtcagagagtgttcggcgtctattcttcgttttgcgaaagaaacgcatacgcctgtattgctgatcggacatattaataaggaaggaagtattgcaggacctaaagtgctggaacatatcgtagatactgttcttcaatttgagggcgaccaacattatatgtatcgtattctacgcagtatcaagaatcgtttcggtagtacggcagaattaggtatttatgaaatgcgtcaggatgggttgcgccaagtgagtaatccttccgaacttttgctaagtcaggatcatgaagggatgagcggggtagccattgcctccgccattgaggggattcgcccgtttttgattgagacacaggctttggtaagctctgcagtctacggaaatccgcaacgttcggcaaccggtttcgatttgagaagaatgaatatgctgctagctgttctcgaaaagcgggtgggatttaagttggcacagaaagatgtgttcctgaatattgccggaggattgaaagtgaatgatccggctatcgatctgccggttatcagtgcaatcctttcttccaatatggatgcagccattgagccggaagtttgcatggcgggagaaatcggattgtcgggagagatacgtcctgtgaatcgaattgaacagcgtatcggtgaagctgaaaagttaggtttcaaacgtttcttgctacctaaatataacttgcaagggatcgatacccaaaaactgaagatagaattagtaccggtgagaaaagtagaagaggcgttcagggctttattcggataagacactgatgcataaatagcccgtttttctaattggataatcgaaaacaatatcaataataactaaatgacacaagaataccaactccgtatacttcccgaaatcgcagcaaacgaacagaaattaaaggaatatctttctaaagaaaaaggtctgaatttacgtgacatcaccgctacccgaatcttgaaacggagtattgatgcacgccagcggactatcttcgtcaatctgaaggtaagggcatacatcaaggaaatgccgcaagaagatgagtacgaacgtactatatataataatgtagaaggaaaaccgcaagtgattgtcgttggcgcaggtcccggcggattattcgctgcattacgccttgttgaacttggattacgccctatcgtcatcgaacgtggaaaagacgtgcgcgaacgtaaaaaagacctggcacaaatcagcagggaacacactgttgatccagaatcgaattacagtttcggagaaggaggtgcaggagcttactcggatgggaaactctatacccggagcaagaagagaggaaatgtagataagattctgaacgtattttgccagcatggagcttcaacttcgatattggtggatgcgcatccgcatatcggaacagacaaattgccacgtgtcattgaaaatatgcggaacaccattatcgaatgtggcggagaagtacatttccagacacgaatggatgcattgattattgagaacgatgaagtcaaaggtatcgaaacaaatacaagaaagacttttctcggacccgtgatactggcaaccggacattcggcgagagatgtatatcgttggctggctgcgaatcatgtggcgattgaagcgaaaggcattgcagtcggtgtccgtttggagcatccggcaatgttgatcgatcaaatacaataccataataagaatggacggggcaaatacctgcccgctgctgaatacagctttgtaacacaggcagaaggcagaggagtatatagtttctgtatgtgtcccggaggtttcatcgttcctgccgccagcggaccggaacaagtggtagtaaacggcatgtctcctgccaaccgtgggtcacggtggagtaattcgggaatggtagtggaaattcaaccggaagatttgggaaatgaagaattaaaaatgaggaataaagaattggctgcgcaacaagatgaacagctgatggcactaaacccgaatttgaaaagttcacaactttcagagattaattcacagttactatctgttcttcactttcaagaggaattggaacgtcaatgctggttgcagggaggcagacgacagactgctccggcacaacgcatgctggattttacccgcaagaaattgagttacgatctgcccgagtcatcctatagtccgggattgatttcgtctccacttcatttctggatgccatcatttattagcaaaaggctatctcttggtttccaacaattcggacgaagcagtcacggattcctgacaaatgaggcagtaatgattggtgtggaaacacgaacttcttcccccgttcgtatcatacgcgataaggatactctacaacatgtcaccgttcgcggattatttccttgcggagaaggcgcaggctatgccggaggaattgtgtctgccggggtggacggcgaacgatgtgcagaagcagcagccaactatttcaatcattaattaaacttacactaaaatgaattatcaacccgaaatagcaatcgtagaagccaatacattgacctgtctcggtctgaaaggaatcctggaggaaatgattcctatggcaaccatacggacttttcatcacttcagcgaactgatggacgatactcccgatatgtatgcccactatttcatttccgcacagatttacgtggagcacaatgctttctttctcccccggaaacgaaaaacgattgtattggcaagcgacagtccgcaattccaactgtccggcgtacctgtactcaacattcacgaatccgaagaagagctggtgaaaaacatattgaaacttcaccaacatgctcaccatgacggttatccggtaaaagatatgccacccatgcctccgatgcagcctcatcaggaaattctatccgcccgtgaaatagaagtgctcgtactgataaccaaaggattaatcaacaaagaaatagcagataaactgaatatcagcctgactaccgttatcactcaccgaaaaaatatcacggagaaattaggcattaagtccgtctccgggctgactatttatgctgtaatgaacggatatatcgaagctgaccgaatctgacctcttaaaaaataagtcataatcctaataaatgaggattgactgtcatctatatttgccgttactttgcaccagataaattaacagcagatgaagacaaagaatattatgattgccctcacgctcctgacgacaggtacagcatgggcggaagatttcccgaaagactcactaaaaatagtagacatcgaagaagtggtagtgattgccactccgaaagagaatcgtaagttgcgtgaattaccggtggcagccactgttttatcgcaagataatatgcgcgccaatcaggtgaactctgtgaaaaacctgacaggcatcgtccctaatctgtttatccccgattatggttccaaactgaccacttccatttatatccgcggaatcggctcacgtatcaacactccgtccgtaggactttacgtagacaacatcccttatatcgacaaatccgctttcgacttcaactatgctgatatcgaacgtattgacattctccgaggaccacaaggtactctctacggacgtaatacgatgggaggacttatcaaagtgcacacaaaatcgcctttcacttatcaaggtactgatatccgcatgggagcagcgacctacaataattataatgtgtcactcacccactatcaccggacatccgaccgcttcgctttttctaccggaggtttctacgaacacacaggtggcttctttgaaaattcggcaagaaacaacgaaaaggtagacaagagcaatgccggtggcggacgtttccgtggtatttacctgcctagttcgaacctgaaaatagatatggcccttagctatgaatatagcgatcagggcggatatccgtattactataccgggattacccccagtgcgatagctaaagcgaaagaaaatggtaaagaaatgacagaagaccgggcagattatatcggtaagatttcatataacgaccgcagcagttaccgccgtggattgctcaactccggtgttaacatcgaatatcaagccaacaactttatattaagtgccgtgacaggttatcagaacctgaacgaccgcatgtttctcgatcaggatttcacagaaagagatattttcaatattgagcaaaagcaacgtgccaacaccatttccgaagagattgtgttgaaagccaaacccggaaaaagatggcagtgggctacgggcgctttcggattctatcaatggctgcatactacgggacctgttttgtttaaagaagaaggagtgaagtcggtcattgaaaacaacgccaatgcagcttttgaagaagtatctgccaaacccggagctcccaccatgggaatgactgtgcacaacccgactttaagcgtaggaggaactttcgacaccccgactcttagcggtgcactttatcatcagtctactttcaacaacttgttcatagaaggactgtccgttacagccggcctccggctcgattacgagaaaatcagtatgaagtataattctcttagcactcctatcgattttggttttgattttcacttagctatgggacccaaccaaataaacttgtctgatcagaatatgaaagcccctgcctctttcgttggcaagctctctactgattatgtacagctcctacccaaatttgctattcaatatgaatggaagaatcaaaataacgtttatgccaccgtcacccggggatatcgttcgggaggatataacatccagatgttctctgacttatcacaaacagaattgaaaaattcgatgatgaatgccatcaaagaaagtccgacaatagggcaagatgccacctggggaaaaaccatcattaatatgatgaaccaaatggtacctacaaaagagattgatgtaaaagcatccaccacttacaaacccgaatattcgtggaactacgaagcaggtagccaccttactttatgggaaggcagactttgggccgacgtcgcagcattctatatggatacccgcgaccaacaactctcccaatttgcagaaagtggtctgggacgtatcacgatcaatgcaggaaaaagtcgcagttatggtgcagaagcagcccttcgtgccagtgtgacaaaagaacttagcctgaatgtcagttacggatatacgtatgccacctttacggattatgtaatcaccgaagagcaaaaagacggcacttttaaagtaaccgcagattataatggcaaatatgttccctttgtccccaaacataccttaaatatcggaggagaatacgccatcacctgcagtccgcgctctatcttcgaccgggttgtattccaagctaattataacgctgccggacgtatctactggactgaacaaaacgatgtcagccaatctttctatggcacactcaactggagaacgaatctggaaatcggtgacgcaatgattagtttctgggcacgcaacttcttgaataaagaatatgccgccttctatttcgaaacaatgaacaaaggttttatgcaaaaaggacgcccaatgcaatttggagtagatctccgctgccggttctaatcattttcactcatagagatattatttagtcattttattgtcagctaaagattttatccatataaaacaatgattatcaatccattgacacctgacaataagtgctgacaataacccaaaaacaggctgacaataaaagattcggacttttattgtcagcctgtctcttatagattgatggcatggaatacgtgatagaagaacgtatgcctctatgaagtatgcattataaagtcgttatacttaattaatccaataggcattgttctcttaaccctacgctatctttacctttccatggctgtggtagcttctcttcacgaccgtggagagatctcgtcacggctgtgagaagaagtcaccacggccgtgggaaggtaaagatagcggtaccttcacacaactataccggcatcttaacggaactttaccggtactctggcattactttacctacagtttcctattggtttgcttatatctaagattatcttgtctacatctaatacacttcaactacactccaccacgattaagcaagtttctctgttccatcagacacacgcgtcatttgataagcgatacgctctgtaccgttctttacataaatgataccacaacgttgaaagccatacttcgtcaatatatgctgcatgactttattgtcccgatgagtatctacccggagattgggccaacgttcgaaacaccagttcaagcaggtttccgatacccccttctgttttccgttcgttgccagccgatgaatcactccataaggttcattattgagccatgttccttcataaatctgttgataagtagggtcgtcgcccaagataaaacaaaaagtccccaagatttctccctgttcatctatgcagacaaagctatgtccatcttcaatttcctgacgaatcaatacttcagaaggataaccgtcaatccattgagtagtatttccggttgcacgcataaaggcacgggcatagtcataaatctccatcactaaagggagatcttttatttcggtagatctgatttccatcatttgaaaagttattcaagaataaaacagataataaaattactcattgatagctccacaatgggggcatacacctttttgcttcaacttttccccacaacgcccacaacgatacttatacccaatgttccgatggactttcttcgcaaaaaccagcataaaaaaggcaaggaacagataaccgatataaatatgtgtcatcaggataaagaagaaatagcagaaaatacagcaagacatcaaccccagcagataaaagatagctgcagcgggagtcaactgtcggaacaaatcatccagcaccgccaaagcgactatcaaaaacagccaaatactcaacaagaagacagagagaataaaaggaactttgaacggcgacaaagtaggattgaaataaaaatgctcccacgtttccggcacaaagacctgcatcgattcgtaaatcgttgcactgaaagccatcaacaaacagagaaataacggataaacactatctatatcattaaaatagaccatctgcaactgctttcgacgaaaagcgcgaaacagatatacaccgacgaataaagcgaagatgataatgaaataagaagcatgcgtatcactgaaaagatgaatggcctgcgaaatactatcagtcggcacaaatgacttcttgagttctttttcacgtatccagccctgttcatcctgtgtgtgagccagcttcacccaaacactgtctacactatcggcagggtgaaccgcaaactctgccaccactaccctatcccctttattcaactgaataaaagtatcttttatcggaagacattccaaagagatggaatcatcgactacttccaagtttgtattccatgtataatgccgttcgtacaagtaagtcaacgagtctttcgtcttcttcgacagttcttccgaatccaaagccggtgctttataataacaagatgagagcaaaagtaaacatagtaggaggttcatcactgttttcatcactattttcaccacagaggacgcagaggacacagaggataaaaaggataaagagggtaaaaaggggaaagaaggtaaagagaaaaactttctacactttttccaaaaaacactcaaacagtctgtatcagaagaatgagtgaagatgttacctccactatatcctctgtgtcctctgcgtcctctgcgtcctctgtggtgaaaacggtggtgaaaattgtgaataatgattctcattgagccgcttttactttcatttgacaattcttacaatcaaattccagacgaaaacgtttgccgtcatttgacaccaggtaatagggttctttataaggtgaacgtacccgttgatggatgggacaccatcccatactgtaacgcaaacaatgtttgcagaacatcagtaccgcatcttccaccgcttctttttcgtaagccgctgctacctgttgaaccccatgctcctgatagaaagaggctgcacgagtattcatgacatttcccagataggttagcgtcgtttgtggaaaagcatgattggttgacttccataccgacaattcctgacggtaattgattcgacgggcagttattaaccggtcgattgcctgccggcggaaatcggctaataccgaagccggcagaaaccagttgccggtaaaagagatttctatttcttttgcttcgaaaggcgtattccccaatttggacagttgcgttttcaggttgtccgtttgtggagtccgagccggctctttctcacgtggaagggtgattgtgacgctattatcatcttcgtcagtcaatgtcaaagagaaaccggaatgatggtcggcaagcaacattcgcactgcgattttcctttcggcagacttacgggaaagcactcgttcaaattcttggtcgaaattacgatacaatgtggtacgaggcttgatgcgaggcatttcctgtgggtatagtttgttgctgtccacccggttgatgcggaagccctgtaaacgtccctgttcgtcgatataacaaacaccgtctccattgttaaaggatttaagtcccgcaaccgtcagataattgccgcgaatctccttcacagtccccatctcctcgcccaacgacttgggagtgtcgaaagagaaaatctctttgtcacgtccatgcaggaaataatgtgtgaatccacgactgaaactcttatccagttgtggcttaaactcgaaattgcacgtacccgaagaagcccttacatattccggacgacgggcaaagatggcatccagcttctgacgataagcggccgttacattcttcacgtaagaaacgtctttcagtcgcccttctatcttgaacgaggaagctccggcatccagcaattgctccagttcgtcactttgattcatatctttcagggaaagcagatgtttgtctttgacaatcactttcccgtccgcgtctaccagactaaaaggtaaccggcagaattgcgcacattctccccggttggcactacgaccgaaacaggcttggctgacatagcactgcccgctatagctgacacaaagtgccccatgtacgaatacctctaaaggcacttccggacaattttcgtgtatcttttttatttcacgcaacgatagttcccgcgccaggactacttgccggaaacccgccttccaaaggaattttactttttccggtgtacggttgtccatttgtgtactggcatgaagcggtatcggaggaagattcaacttcgtgatccccatgtcctgcacaatcagcgcgtctacgccaatccgataaagtgcatgaatcatctcctccgtctctttcaactcttcttctttcagaatcgtattgaccgtgacataaatacgtgcatgatacaaatgggcatgctgcaccaatgcttcaatatcttccaatgagttcacagccgccgcacgggcaccgaacttcggagcaccgatatatactgcatctgccccatgattgatagcttcaatgccacattccaggtttttcgccggagcgagaagttctattttacgctgctttatcattgaatatcgttgatgttgtaaggtgtttcctgataaacgaagtagttcagccaattggagaacaacaaattggcatgagcacgccaacgtaccaacgggcctttttcaggatcattgtctatataataattgcggggcatctctatcggcaagcctttatcgagatcgcgacggtattccgtgtccagtgtcagcggagaatattcggagtgtcccgtgacaaagaattcacgaccgccccgtgccattgccatatagacaccggcatcttccgattcggaaagcaacgtcaattccggaactttcagaatgtcttccctgcgtacttctgtatgacggctatgcggcacatagaaacaatcatcaaaaccacggaagatggagtggaaaggttccaatacccgatgttcaaagataccgaacatcttctctttcaacggatatttaggaactccataatgatgatacaatccggcctgcgcagcccagcatatatataaggtagaagtgacatgcgtacgtgcccaatcaaagatttccgtaatctcatcccaataggtcacctcctcgaagtccatctgttctacaggagctccggtgataatcataccatcatacttctcgtgacgcatctggtcgaaatccgtatagaacgttttcatgtgttctatcggcgtattctttgacgtgtggctcttgatcttcataaatgaaatctccacctgaagaggtgtattggagagtaagcgcaccaagtctgtttccgttgtaattttcaacggcatcagattcagaatcacaatccgtagcggacgaatatcctgttgcgtagcgcgggaagtgtcgatcacaaaaatattctcttccttcaaaagctctatcgcaggtagtttatcgggtaaatttaaaggcataatcgctatatattagtaatttgagtgcaaaaatacgaaaaatatagcagattatagggaggtagcttatttagaagacgtacaaattaagtcaatttaaacatagaagcataacaaccaatcaataaaagccttatttttgccggagaaattagtactaataatttaaatcttagaaaaatggcatacgtaattagtgacgattgtattgcttgcggaacttgcattgacgagtgtccggtagaagctatctctgaaggtgatatctattctatcaacccagatgtatgtactgactgtggtacttgtgcagacgtttgtccgtctgaagcaattcacccggctgaataatacaagttacaaaaagagtataggctgctttctatggaaggcagcctttttttattcctctttcttcaccacagattacacagattaacacagattaattcacaatcacacggatagaaaaatacaaagaagttccttaaacaaaaaatcacccttactgcatactgtagtaaggatgattttattaatctaatatttttcagacagacaatctcttttcaatctgtgtcaatctgtataatctgtggtgaactattatttcaacttagccaatgcttctttgatacgacggatagcctctacgatattttcatcgcttgtagcataactcatacggatacattcaggagcaccgaaagaggcaccacctacacaagccacgtgagcttcttcaagcaagtacattgccaaatcatctgaatctgcaatcttacgttcgccgttgctctttccaaagaaagcatcgcatttcgggaacagatagaaagcaccttgcggaacgtttacctcaaatcccggaacttccttagccaacttcacaatcaggtcacgacggcgttggaatgctttctgcatttcttttaccggttcttgtgttcctgtatatgccacttcagcagctttttgagaaacagagcaaggacctgaagtgtactgaccttgcaacttgttgcaagcttttacaatccattccggaccggcaatgaaaccgattctccatcctgtcatagcgtaagccttggatacaccgtttacaatcactgtacgttccttcatttctgggaattgagcgatactctgatgtgcaccaatataattgatatgttcataaatctcatcagcgattactatcacctgcggatgtttagccaatactgctgacaatccggccaattcttcttttgtatatacagaacctgtcggattagacggagaacaaagaatcaatgctttcgtcttcggagtgatggctgcctccagctgttccggagtaatcttgaaatcttgttcgatacctgctgaaacaattacaggagtaccttctgccattttcaccatttccgggtaacttacccagtaaggagccggcacgatgacttcgtcacccggatttaccaatacaaggatggtattacaaacagattgtttggcaccattggcacacgaaatttgagcggctgtatattccagaccgttttcttttttcagtttctcaacaatagcattgcgcaaagccggataacccggtaccggagagtaacgagaaaagttatcatctatggcttttttcgcagcttctttgatgtggtcaggagtattaaaatccggttctcctacacttaagttaataacatcaacaccctgtgccttgagctcgttgctcttttgcgacatggcaagcgtcgccgatggcgacaagctgttcaaacgatctgataattgattcattttgtatctattttattgttgttgagtgaaaatcgttgcaaaataagcgataatatttgatatatgaaaacaaattggcaatttacttattaaaatgtaaagtatgccccattctttctttctttgttctcaagtatcgttcattatacggattaggaactgtttcaacaggtacattttctactatctccaatccgtatgcttccaaaccaacacgtttcaccggattatttgtcaaaagtctcattttgtgtactcccagttcacgaaggatttgtgcgcctactccataatcacgttcgtcggcaaggtgtcccaaacaaatattcgcgtcaacggtatccataccgtcttcctgcaacttatatgctttcatcttttccatcagaccgatgccacgtccttcctgattgaggtaaaccaccacaccttttccttctttttcgatcatttccatcgctttatgcagctgctcgccacagtcacaacgttgtgagccaaggatatccccagtagcgcaagaggaatggacacgtaccaagatcggttcgtcttcactccatgttcctttaaatatagccatgtgctccaatccgtttgatttctggcggaaaggaatcagacggaactttccgtgttcggtaggcatatttacttctactcctttttctacaatggattcctgtttcaggcgataaacgatcaggtcatggatagaaatcagtttcagcccgtgttcgtctgccatctgacggagttcgggcaaacgtgccattgttccgtcttcactcatgatttccatcaaggcacctgcggggtaaagtcctgccagacgagccatatcaatcgtagcttctgtatgtccggcacggcgaagtactcctttttcttgcgcgtacaacggattgatgtgtccgggacgcccgaaagtagccggtgtagaagtcggatcggccaacgcctgaatagtagcggcacggtcagaagcggaaacacctgttgtacagccttccaatttgtcaatagtaaccgtaaaaggagttcccaacacggaagtattatcacttacctgatgcggtaaatccaactccttgcaacgagacactgtgacaggtgcacaaagtacgccacgtgcatgcttcaacatgaaatttactttttcgggagttatcttttcagctgcaataatcaagtcgccttcgttttcgcggtcttcatcatccactactatgacaaacttgccttctttgaagtcggcaatcgcatcttctattctatccattttaatagtctctttcataacacttatttattgattttctgtatgatgaattgaatttgttcattgttctttataatccgttccatatccttagccagacgaacgcggaacgcccagatgcggaaatagaaaaataaaccgatagggaaaatgactccggctaccagattcaaccaatatatatggaacgggcgcacatgagcagaaacggaaataaccggataattgtttaatgcaccgatcaaagtggcagatttcgtattggacatttcttcgaccaacgcttccagcttttcattgattgccatcacctcgttatcatcctcactcgccatccacaacttaaagtaattcggtgctttttccaatcgtttcctggcggcatacgctttacactctgccgaaagttgttccaaatcacccgtcagacgtgcgtaatcaggatcatgaataatcacttctttcttaaatatatgacgcacactacgaattcccacaatctttttaaaccagttgatataagcatctgcattaagcaccacagagtctttattcgatttataagtaaggaagattcctaacggggcaaggactgcgctacttgtccacatccccatccaaacaatccacttaccgtcgcgggccattttatatcctgtattatcaatgatataataaatgataaacaccaacactgatacgatgaccggcattcccagacctcctttacggataataccgcccaacggagctccgataaagaagaacagcagacaagaaagtgaaattgttatcttcttatgccattccgtcttatgttttcgaatactataatcattgttctccatcgtgaatttcttgaacccaagatcgttagccacgttctccgcacgactgacagcagaagaaatcaccttctgtttctgcgttaaagaggctacttcgtaaaggctgtctacattatattcatgaatatccgccttttctattttgaccgtatcttcttttgtcaatccataagaaggacggaaatttccttctgccacttccctgtaatactgtcgtccgatactgtctcccacaaccgtcatcgagtcaatggaactctgcaactgcgccatgtccttagcactggactgtttacccataatctcaccgtcaaccatattgaaatcggaattaaactcaataatggtatgtttttccctaaattcctcgcgtcggtaaggtacattctccgatttcatactttgagctttcagattctcaaataaatctccgctatacaaatgcagccaaagatgctgtttatccgcggtcatctccaaacgcccggaatcagcatatataatacgtgctttctcaaagccatctttcatactataaatcagcacatcatatagcataccggtcttccggttcttcttagctacctttaaattatagtccttgatttcagaatagaaaactccttccggaatgtccaactccggagatttttgtttcatcgaaaggatcagggttcccagcttagcctgggcgataggacctactacattttggaaatagaatgagacaccgacaagcccgcaaacgaagaaagcaagcggacgcatgattttaaggagagaaatacctgcggctttcatcgcaagcaattcataacgctcgccaaagttaccgaaagtaatcaaagaagccagtagcactgccaatggcaacgataccggcactaatgttaacgcggaataaaagaagaattgagccattacgctcatctccaatccctttccgaccaattcgtctacatatctccacaggaactgcatcatgaatatgaacagacagatgaagaatgtaccaataaagagcatcaaaaaactctttacgatgaatatatctaatttctttatgcgtagcatcttaataggttcgtgcaattaggatgcaaaattagcacaaaaaaaggagcatcgaaaatttttagttgaaagttaactaaaaaccacaagttcttcttaatttagctacttgcgactcccacaattctttcatatcggctacttcatccggctctgcgaaatcggtaatttccaacacatagtcactagtcagctcattataagtcatcttgatttcaaaataatcgcgttcgttttcatcatcctgccaacggaagcggataaaagagaaagagcgaatggcaataatttctgctttcctctgttctgtcttgccccaatgaaactctactattttatcgtcagaaataactttgtctgcaaaccagtcctccaacccggtcggtgtgctaatagctccccaaagtatatttttagatgttgcattcaacaaatactccaaatgaatcttttcctttttcatagcaatttcgaattgtttttacgtgtgccaagataaatacttttttctaaatacaccgcataaatcagacactttatttaattattctttcattatcgagcctcaaactccctgtttatagggaaaaccaagacccgtattaaagaaaaaacacaaaaaagttatgaattgttttggagattataaaaaatcatctatctttgcacccgcaatcgagaaacgatggcgggatagctcagctggttagagcgcatgattcataatcatgaggtccccggttcaatcccgggtcccgctacttgataagaataaggcatttgggaggcttccacttctgggtgcttttttcttttatacatcaattggtggcggtttacactatggtttacaccagtgcaaatcatatatcaatcagattaaacattattcattattaaacatatcaaattgactttacccaaacaagttccagtcaatattatccttcccacttatccattaaaccataatactccagtttcatccaaagggatatttgagcaatgatagattaacgctaataagcaactttacatcatttatttaagattccattcttacattatgttcacccccccttctttgtaattttgtagtagataaatcaatcactaatctattaacattaattctaatatgagagtaacagagaagactaacacaattcattatttaccacaagagattaaagaaaccaaactcacagaagtaacatacctacctattacaagggaaatgttagaacaactattctcaaattcagctaagaagaataagcataaattagttaagaagagaaggaggtaattaataaggcagcaaatgaatgttacttcaaatgctgcctttatttgttggattaagaggtcaacctctcttataggtcatcttagcataatgttcagatgtttcatccttatcatgaaattcaagtactaacttattggaactgatttcaagaacctttaaatcatactgttcatattcatcttcaataagagttataacattaccattcacttcccatttctcaatactctgcgggttacttgtaccgtccaaatcatattcactgtaagtaccgtcttctctaaaggtgaagttaccgaaatattcacattcatctttaggcgcatgactccatgcttcatcatcttcgggatattcagaatccttaatgaatccttcctcataagtaagtacccaatgccctataatcttctctgcaagaggtctgttgtcctcttcatcgtcatcactacaagcaacgaaatttacactcataataatggctactatagccataccaataaatcttaatgtcttcatctttaaattgttttagttaattaataaattatacattagggttcacctcattatcatttaaatcaccaccgttgaaattcatatcaacattctcgtttcccattggagtatcatcctctttaactcctaaagaagaatctgtagtaccaccattcacatttacattgacagtagtcattacattgcgttttacagtaattacctcctcaaacgtttgggttgctccattagcccgtttccattttaaccgtatggtgaagtctttagtatagttctctgcttgccaacattcataaacctcatagaaggtgtacatagaagaagattccaatatattatcgtctgctgatacctccacattggaatttatggaatggtaagagttatcatttgttgtaatactgctaatatacagtttaccgtctacaggtggagttactataaatttaagtccaaaggctgtacgttttagatctatattagcaactccgtctttagtaggaatataatcggttaactcgccatagaatctatctgttttaggataattgcttctgacaaaacttgactccgtacatacgtccgtagtaccatatttaatgtaatctaaatatcggtaagtcgttgttgagacatggaatttattagtcagttgggtaactgtgtttgcgttataatctccattataattatctccagacataaaaggtcttccataatatccattcttatcatgataaattatatcattgtcattctgtatcatggtacattcaaacttatacctatatccactaatcagggatatagtcatatcttgaatgttgtcaaacaatccataggcataattatcataccacgtatttccgtccttcttataatacacattaatcccatatatcttctttggtgcaacttctgttctgcttaaaggagtttcagaagtggagataaactctccgcccaaattgaatgagatagtgtaggtttcttggttagtctgctccttaggtggtagttcatcctcattattactacaagagaatagagtactacttcctatgagaagcataccaattaatctgaatatcttcattgtaataatctgtttgtgcttctacgttcccaatagagagcgttaataatttagatataagtgtgaggaacacaacacggagttgcacacttctttgataaagaactgttgagtagtaaaatagactgtctgtttcttatatacctgtatttatgccaacctgttccctatagttggttactacatacaagaagcgtgggaactattgaatattacctaatccgaggctctggactgcccaaacacaagtaataaacaatagcccacgccaaacgatatatagactatctaataagataggtatataacattgacgtgagcgttcttgcttattatccttgtgttttgaaattgtccagatttcagattaaggataatatcttaaacgctcttcgttaactatgtcccttcagccctaacacattaggtatctgaaattgctacaaagttacgaatttacgtttgattagcaagaactattgtttattaaatgttgagagctgtctctactcaataaatcaaggttggtatgaaacttgccaaatccccatataagtagaaattctgaacttccataccaacctaattatcagaagctaaggcaatcataggtatttaataattcctcttgccttaatcccaagtatctcttagtaattgacacactggaatgattgaatagctccatgagcttaacaagtgcaagctctgaattatcactgttcatattatagacctgtctgccaaaggtcttcctaagagaatgacaactgaaattgcctatatgcaacctgtacttcttcttaatctccttcaacatgacattgattctctgaactgtgtagactgttcccttctgacttatcaatacaggagcatttatgccaactggatttatatgctcataacaatctctgatatgttgttgtagctgcatgttaatcctaattgtcctttgcttccctgttttaatctctgtaatggtaaactcttctgcatctagtatcagattccaccttaaggcaagaatatcagaaattcttagacctgtgaagcaacccaaagcgataagaagtgacatcttataattattatctcttgccaactttcttattaagttcattgcttcgctccattgcagataatctgctgttgtacttgaatatttaagtgacataatgttctgttttatagtgaaactaatataagtgaatattaattttaaactggaatatctaacttactgattattagctaaacattcactaattaacaaagtgaatattatactactagctatagctaataaagagtacctatatatagtatatagatacccttattagtacttcatatactacctcaacataataatttgaaatattgatatatagtccaaataatcatgaagaagaatacaataggtgaaaccgcacatgcaataaagaacataatagtccaaaatataacagcgaataatgctactaacataaatcgctaattattaattaagtaatgaataaattaagggacacccttattatatggatgtcccctattaaatactgtataataccactaactaagaaaccattggtatttgtcatcaccgtgtaaagcggaacatatacccgttgcaagttctgtagcattataggctctatccaagaatgaatctatatagctactcttatttgcacctgtgagcaagttgtagaacttccacatagacaaatcattccccaagctgccaaagttctcatcattgatatatgctttagccacattgttaacctgtgtatcagtaagcagcattttaggtatatctttctgatagccttgcggtaatgactgataaagtctcattctgcctaatagttggcagaactgatgctccgtcatactggtattgcctaaagactgcatcaaatgtatgtgtttggctgcatcgtatttgtggaacatctccaataccgcttgatataaatcccttgtattggtaacttccaagcaactaagataaccgtccgtagatacacatagatttgtgcaaaccttacaagtaaagccaataaacactttaaaccgctccgcacccttctttgaataaagattggtgtggttataagctctgacaccgccaatagtaagtgttagcctgttaccgtgtactgtctcatagatagtaggaacttcaataacaaaagcgcacctctcgtagtagatagtcttgtcactctctaataactggttggctggcttatgaattgcttcgggaatcctacccttgattacatgagaaacacgaatatctggcgattcaatttgttcaccgctaaagaatgtattggttgcatcctgtaccgcttcaatgaaagccacatgagataatgtagcttcgttgtcctttgcgaatacgggtataatacaatcattccttagatgctccaaactggcttcaatcgtattggcttcaatgaatagaggtcgtttctgcttaataattggctcttcaattattaccgcttcttctgcatattcaccaaagtttctactagttctttgtactggcataatctgtaatgttgattccataatctgataaattattaagttaatatgattagtaaatactgcatttgaggacaaaatgagggcttaacatgaagttctattcattcacttatctttgtgcatctttatatgtagacatatacaaatcgttgataagtccgcacatttcagaagttcaaagcgtttgtggactgaatagcgattcatgttatcctttcatttctccaataatgggtaagggggtgttttagggtaacaataaagcttagcgcatgatatacatctgatatatgtcagcctgttcactgacaaatcaaatattttactctatagctgcataaagtctaaatagaaacacgacctaaatctaaagggcgggggtatgattttagataccctattcttgggttggggtatataataagaaactccaaaccgtattagtggtctggagttttactcttattcaatcaaagccttgatagccttcttggttcttgttctccttagttggcttaatccaagatgctgatatccctgttctaatattgggtctctcttcataaggctttccaactcctgccgctcgttatcagtcagagcggatttctccttcaagtcacagaagcgtttgagcctgtctctgaattggggagtggtaagtatgcctttgataatattctcgtctgcgatactccattcatacgtctggactattgccatgcccaactgtctgtagccttcctgcaatgcttctgccgacctgtacactatacgtgtagtccagtgttggtagagttttaactgggcaaccatgtcattgacttcatacctgtcacccttcttgatgatatatgtatcagcccccaatttcttaagttcatcgtcctgctgtttctttgcaacttcccctaacttgctctcattcaatacctgtacccgttcctctgctgctgcaagctccttagctatcttctgcttcatttcgtcaaacggaaggtagtagttcataacctttggattgaagatatggactatcttgtttctgaacggattggacttggttctgatacgtcctgcaatctggggaatatccatatcaatgctgattagggtatgcttgttgtaaccgttgctgacaatgaagcatattgccgtttcagaataataatccactccttcaaacgccttacaggttacaaatgtaaaccgtttggcgggagctgttgaactggaaatctcaaaaccttccagtttgtaatggttcttctcatcatccgcacatataattctgcaatcatcattagtcagtctggcttcttcaagtatctccttaatctctcttacgctattaacaaagaagtaagcttcttcactcttaatcccgtccagtacaaagtaaccgttgtctttataatgccttataatcttggcagccgtactgcttgagctcttacatggataggggtagattgtaatcttatccaccgtcttccagtcagccacgtactctgtcatttcagcaaagactttgggcttgaacagttctgggataggggttgcggtcaggaagcaatgggatttgaagcatttgaagttctctatgatttgatttatcaccattgtcctaaacccgtactgttttaacaggttgtggtattcatccacaagtattttaaattccagtggattgataacaggaatcaacttgtcaaccttgtcataagtgcagattatcttcttcactccgtccttatcaagaaacttccttaacttgatttgcaatgtcttagtgaaactgccatacaagccgaacagtctgttattaataggacttacgcctgcttgaatctgtgacctcttccaagtaatgtccttaccattcttatccttaggtggataacacttattaattactaactctgtcgtaggtacggctataatgtaattctcgtcattggtaagtgctatcgtagtagcaccacatcctgtcttcaccttgttgaagatacagttctctgggaagtcctccataatgaggaagccgtcccgctcttgaatttctaactttaccataagttatcttttgtgattttaaatatgttacctgtgcccctaattattggactttaaataatcctaaactctgaatattggggtaactgaccgttttatatagggataattcaccactctttggagattccaactttatccccacttctgcttggtgattggaaaacagctacctgtcacctcaataatcagactttaagttactctcagcttcatttattagggtaacccgtattattatataatggaaattcaccactctggaagaatctggagtagaagagcctacctgtcacataggctctttacatggtcagacttcttccgcttccagataaggaatgtcctctgtgtcatcattggcggtcacttccttgctgtctttaattgagatgacagtagtagggcgattgtaccgttctcttatcttctcaaactgttccattactaaattctcgtccagatttccgtgtgtattgaacattgccgccttgtcgttctgtgtaatggactggaatatcttgacagcttccttgacgtctcctgtaattgtcttgatattattgaattggttacttaagtatctcttggcaatatccttgtcatcaaagcctttatccttgcagatttggatgaacttgttacctatctccatgttataggctggaatgataggcttcttcaccttcttccccttctcatccttaccagagcataataaagagaagtcagactttgatatagcgttattattgccacaaaagataaggttcagtgttgagattggataaccgtctgggttcttctcgctctttattaattcgttgtaccgttgcagaaattcattgtctgggttaatattggctgcaccacgcacatagtctggggtagtccattccttcttggtaatattaatctcgttgatatattctgcaatagtttcattcccttgcagttcaacttcaatggcgggtacatttattgcttcctctccgttctccgctgcccattcattatagagggatgcggcaatggttctgtgctgaccgtccaatacaaggaagtatttggctgcatcttctggatttatatcctgtccgttaatgtcaaccagacgaatgtcacctgttgtgattacatcttctgccttaacgacctgtaccatttctgcctttctataacccttgaccttcatcatggctaatatcttctctacattgcccaagttgatggcacggttaatacctttagcaaaagctacgtttcttacttcattatttgcaacaactttaacttctaaataaatcttcttcatgatagtttaaatttaaattaataattaagtttataaattggtgcaatcttcaacttggcgccttatcgtttctgattacattgcaaaggtgaggaatagtcggaaggtgtgttataaagaatagaaggcgatttgaagtgcattctttagatgtaagaatatcagcgaattagctaatttaaagacataaaaataactaccacgtgattacatggtagtctgtaaggattggtggattattaattaccagagatgttctgtagactgattattgggtgagaaattgtagtcttctgtctgtttggtcttccattgcggtttatagccttgtttcaccaaataggctattgctgcattggtgtagttctcatcattattgaaactgcctgcttcaaataataattccatgtagtctaaagtcatacgtatctgttcactcttggtctttattgaggaatatctttgtaacaggtggaatgtaccatacatgattagattatgggctgcattattggctttcctgcccttcttctgtgaatatacttccttcaattcctgttgggcttcttccaaactgtttactcctaaatagatgtgaaggtagttatccaataaatcactcagccaatagcaagagttatcaagagtaatcttcttaactccgttatcaatggttataggactgaatacccttagctccttcttcttggaaggtgagtatctcttggtattcagcaactcatatagctttagcatttctggacggacttgttccagataaggcagtgtgttctctgatatgacaacttctgtgtaaagttcaccattcttatacttctcatatatggcagctacaacaagcatacttattccaattactccgtcattatcagtttcaccatgcttctgtaataaatcaatcagccgttccaataaattatcacttggcagagtgataagtatattgtgttctgaatccataatgaagctacttggattaaacgccttactggtagaagtcgatttgggagcataccgtttataatcaaatactccgttatctactgcgatagtgtttagaaatgaatagtctgtcatgtagttcttacaaatatcttcactgattccgttgggatattcatggtagtaagtagctgacagttcattctcaaacatggcacgcttatagccaaagtattccgtgagtatgggttctatcttctttaattctggaattggtagtatgtaatctctcatatcgcttcttattagtgctgtaaagttaacaagaataatcccacctgcaataattgcaagtgggattaattgaatgtactataataagttcttcattgcatcatctatctgttcgttatcgaaactatccaaataaaattgcgtagttgataaactcgtatgccctaatgcttcacttataatagcaacattgactccagaacgtttcaacactgtggcgaaagaatggcgggcaacataagtaatatttagaaatgcaataaaaaacagaatgacgataattaaacgtaaaacgtttataattaagcattttgcgagaattgcagaacagacagacctgcaaaagaaaacaaaatattgcgacgtttcagttaccagactgttagccgcctgtttcggaaacgacggcaggtaaccgaatttttaccgataagaacaaagcggatttgtattcactgtttctcaatgttttgcatgccaaaggacgcttttcaaaggagtatttttacaacctaaaaaagagcgttatgaaagtggaaaaattcaaggtgctgctctacctgaaaaagagcgagccggacaagaccggcaaagccccgatcatgggacggatcaccctcaaccgcacgatggcgcagttcagctgcaagctctcctgcacccccgggctgtggaacgcgcgtgagagccggctgaacggcaagagccgggaagcggtggagaccaatgaaaaaatagaaagactgctgcttgccgtacactcggccttcaattccctcatggaaagaaaaagggatttcgatgccgccgcggtcagggacatgttccagggcaatgcgggcatgcagatgaccctgctcaaacttctcgaccggcataacggggaaatgaaggcccgtgtcggtgtggaccgtgcgcccaccacactctcgacctacctcttcacctaccgcacgctttccgaattcatcaaggcgaaattcaaggttccggaccttgtcttcgggcagctcaacgagcagttcatccgcgactatcaggatttcatccttctggaaaagggatatgccgtggacacgcttcgcggctacctggccatcttgaaaaagatctgccgcatcgcctacaaggagggccactcggagaaataccatttctgccacttcaagctgcccaagcagaaggagacaacaccgaaagcactcagccgtgagaatttcgagaagctgcgtgatctggagataccggaaaaacgcaggtcacatgtcatcacccgggacctcttcctcttcgcctgttacaccggcaccgcctatgccgatgcggtaagcatcacccggaagaacctcttccgggatgacgagggcagcctctggctgaaataccagcgaaagaaaaccgactacctcggacgtgtcaagctgcttccggaagccgtcgcgttgattgagaaataccgggacgatacccgcgagactcttttcccgccgcaggactaccacacgctcagggccaatatgaaatccctgcgcctgatggcagggctgagccaggaccttgtctaccacatgggacggcattctttcgcctcgctggtcacgctcgaggagggagtgccgatagagaccatctgcaaaatgctgggacactccaacataaagaccacccagatatacgcgcgcgtaaccccgaagaagctgttcgaggacatggacaggttcgtcgaggcaacccgcgatttgaaacttatcctttaatccctaaacaatcattatcatgcgcagtacattcaagctcttattctacatcaaccgtaacaaggtgaaatcggacggcacgaccgccgtcctctgccggatcagcatcgacggaaagaaatcggcagtcacgacaggcgtctattgcaaacccggggactgggacagcaagaagtgtgaaatcaaaacagctagggagaacaaccgccttgccgccttccgcagccggttggaagaggcgtacgggaacctgctgaggaaccagggagtggtcacggccgaactgctcaagaccaccgtgtcaggcgccaattccgtaccggaatacctcctgcaggccggagaggtggaacgcgaacggctcagggtccgctccaaggagatcaactccacttccacctaccgccagtcgaagaccacccagctcaacctcaggcagttcatcgaatcccgcgggatgaaggacatcgccttttcggacatcaccgaggagttcgccgaatcgttcaaggtctttctcaagaaggagctgggacacaggaacggacacgtgaaccactgcctgtgctggctcaaccggctcatctacatcgccgtggaccgggaaatactaagagccaatccgatagaggacgtggcatacgagaggaaagaaacacctaaactaaggcatatcagccgcagtgaactgaagcggatgatggaaaccccgctgcccgacccgatgatggagctggcacgcaggacgttcatcttctcctcgctgaccggtctggcctacgcggatacgagggctctccatccccgtcacatcggaacgacttcggaaggaagaaggtatatccgcatccgccgcgccaaaacggacgtggaggcgttcatcccgctgcatcccatagccggacagatactggagctttacaacaccacggatgacgacaggccggtattcccgctgccggtccgcgacgtcctctggtatgaggtacatggaatgggcgtggcattaggcatgaaagagaacctgtcctaccacatggcccggcattcgttcgggaccctgacactgaccgcaggtattccgatagagagcatcgccaggatgatgggccacacgaacatcgacagcacgcaggtctacgcccaggtcaccgaccggaagatatcctcggacatgaaccggctgatggaaagaagaaagcccgcggccggcaaggaagccgcaggctaaataaaaactgccgccggaatcgtaaatgcaattccggcgacaatccttaaacttaaatacgatattataccaatgcagggtgatagttctcctccagcagcctctcgatgtccgactgccagtacaggatcttcccgccaagctggatatagggaatccgtccttggtccctgtaatcctgcaggcacctgcggctgatcttcaacatcccggaaagctccctgtcggtcaggaaccgttccccgttgaagggaggacggttgtcacgggcaagacgttccacttttttctccatgtcgtccagcagggcaaagaacctgcggacacgttcgttctccttgtcgataatgccttccatctcttccgctctttaaaggtttccgttcttccttctttctctcacctccttctccttgcgtctgatgccgacgtagaccatcaacttctccacatccccgggcttgtaatagaacttgcgctggaggcgggtgaacgccagccgtccggtatcgcggagagtctgcagggtacgcggcgagatgtcaaggcgcaggcagacatcctggccgtccagtcactctccgggttccttacagcggtttctctcatacaatctgtccacacgtgcggacaggttctcggcgcgcgccagcatcctctcaaggacaccggcctcgatgtagcatatttccatattttcaactcgtttaaatatcagtgcgaatataagggaagaaaccatgagaggcaagcacgaccggcacactggcaggaatagtcatggatagtcggtttttgtcatatgggaaggaaaaagaaagccgaagcaggtctggatccactaccccctttgggtatgtgaaaggaacgttgtggtgaaagaaaaaactccttttcacacatggatgaggcaatgccggaagtccggcaataaaaaatgtggcttctctatccgggtaaatgccatgattacagacttcttcctgttcctataccatcaggtcggttaccttcaggttaacaacttatccaacctgtgatagatccggatgtgaaaagattactttggctggctattacaatataataagtagaatcatgtcaaatctactgctgctattgtttgttgataatggctggcagtagaacaaactttcgttaaaccaatacgttcattctttattatcaagtttttagactacctttgtattttattaactcatttaccaaacattatgggactactcaaaccgaatcaagttttgaacaaagcatatagacaggttgcgattgaaacaacagattttgacttattcaaaaatgcccttcgcacattgagagacaatattgtggatgggcaaagagaacacacgcaaaaagaacatttacgtaattttctgagtgaaacgttctacaagccatactacatggctcccgaagaagatattgatttggctatccgattggataaaactatcaagtccaatatagggttattgattgaagtaaagagtaccaccaacaaaggtgagatgatttctaatgacaatcttaatcgtaaggctttgcaggaattattgctatactatcttaaagaacgtgtcaataagaagaacaatgatattaaatatctcatcgctactaatattcatgaattctttatttttgatgcccatgagtttgaacgcaaattctatcagaacaaacaattacgtcgtgagtttcaagactttgtggatggacgcaaaaccagtaacaaaaccgatttcttctatactgaaattgcaacaacctatattgaggaggtgaaagatagccttgaatacacttacttcaacttacaagactatcaacacctgcttgatagaacagacagtagcgcttcacgcaaacttatcgaactttataagatattcagcgatacacatcttttgaagctatcgttccaaaatgacagcaattcgctcaaccgtggattctacactgagctgctacacattattggtattgaggaacgcaaagagaataataaaaccgtgattgtacgcaaagctgtggaacggcgtgacgaggcttcattactagagaatactattaaccaactggatgcagaagattgtttgcgtcacataaatggtcgtttgtatgggaatgattatgaggaacggttattcaatgttgcaatggaattgtgtattacttggatgaatcgtatccttttcttgaaactgttggaggctcagatgttgaaataccacaatggagatgcaatctataaatttctttcaataactaagattcatgactatgatgatctcaacacactctttttccaagtgcttgcacgtgacatgggcagccgcacacactccattatgcgtgattttgcttacgttccctatcttaacagttctcttttcgaggtgacagatttggaaagtaaaacaattaagataaacagcctttcacaacgtacggtacttcctgtcttggcgagtagcgtattacgaaataaaaaacgcaatctacaagtcaacgcattacccaccctgcaatatttgtttgcttttctcgacgcttataactttgcgagcgaaggcagtgaagaagtgcaagaagaggctaaaacactcatcaatgcttctgttttagggcttatattcgagaaaataaatggtcacaaggatggttcagtattcactccaggctttatcactatgttcatgtgccgtgaagcaatcaccaagaccgtgttgcaaaagtttaatggttattatggctggaattgtaccacccgtatagaactatacaaccatattgacaatatagtcgaagctaatgaactaattaacagtttgcgactgtgtgatccagctgttggttcgggtcactttcttgtgtctgctctcaatgaactgatactcttgaaatacgaattaggtattttggtagatgctaccggtaagcgtatccgcaaagcggactatcaacttgccattgaaaatgacgagctgattgttaccgataccgaaggtaatttatttgcttacaacccactcaatgcggaaagtcgccgcatgcaggaaactcttttcaaggagaagcgtcaaatcattgagaactgtttatttggcgttgatattaaccccaactctgtgaagatttgccgcctacgactgtggattgaattgttgaagaatgcttactatacggctgaaagtaattacacttatttagaaaccttaccaaatatcgacattaacatcaaatgtggaaattctttgcttcaccgattcgctttgacagacagtattcagaccgtactgcgagagtctagtatcagcatcagccaatataaggaggctgtagctaaatataaaaatgcccaaagtaaaagcgaaaagcaggatttggaaacgtttataacagaaatcaagtcgaaactgaaaacagagatcaaccgccgggatgcacgattggttagattgaacaaacgccgctctgagttggcaaacttacaagcgcctcaactgtttgaaccgacaaaaaaggaaaagaaagcgtcggacaagcgcattgccgatttaaagaaagaaattgcgactttagaaaatatatttgaggaaatacgctccaacaaaatttatcttggtgcattcgaatggcgtatagagtttccagaagtactcgatgccgaaggcaacttcttgggatttgactgtatcattggcaatccaccttacattcagttacaatctatgggtaagagtgccgatgtattagaatgcatgggttacataacttatgcacgcactggtgatatttactgcctcttctatgagttgggtatgaacctgcttactcccaatggttttctttgctatatcacgtctaataaatggatgcgtgcagggtatggtgaagccttgcgaggttatttcgcaagcaagaccaatcctattatgttggtagattttgcaggtataaaaatattcgatgcaataacggtagaagcaaatattcttttatctcaaaaagcagcaaatatttttaacacacaagcttgtttggtacaagattcgaatggcttgaataatttgagcgatttcgtgcagcaacaaggcgtgaagtgtaactttgcagattctatcccatgggtgatattgtctcccattgaacagagcatcaagcagaagattgagtctgtgggaatacccttgaaggattggaacatccaaatcaactatgggataaaaactggtttcaatgatgcttttatcatttctaccgaaaagcgtgatgagatactagcgaattgtcaaacagaagatgaacgtgttcggacggctgaacttatacgaccgattcttcgtggcagggatatcaagagatatgaatatgaatgggcggacttgtggattatagccacatttccttcgcggcattatgatatagaaagttatcctgcggtgaaaaattatcttctgtcaattggcatagagcgtttagaacaaacaggagaaactcatattgttaatggcaaaaaaataaaagcccgaaagaaaactagtaacgagtggtttgaaacacaagatagcatcagttattgggaggatttttctaagccaaaaattgtatggaaaataatcggaaaccaaatggcttttgcatatgatgccaacaattatgtaatgaacaatgcctgttatattatgacaggcgatcatttggattatctgttggcagtattgaattttccaataactgaagtaaccttcgtgtaatcatacgagtctgtgatttcctgcgtttacgcagtttgctataagcaagataggcacggcgtacatcaagatacttgttacggggacgttgtatgtgcaaggtctggcaatgtttgcacagatgacgatgaagccatacaataccttcccataagagtttggtatcagtaggaaaacgcagatgactttcataacaggtggcatcggtcatacagacatgaaggttctcaagataaggtttccaatgctcggcaagaatgagctggaggggctcaacgtcaaggcgatgcgctagttcctgacgaattgcactaacgattttaggattggttagtggatgaagcggatcaatctgaacaccacaaaacaactggtaatgaatattaccgtttaaatgctcaatcagttgtgcatcggaaaagttggtataggacttcaagaccatcaaggctattttaccttcgggagaaaaataacttttacgacccaaagcagaggacttcaaatgcatttgtcgggccagttccgagaaaggaaacagagcatggaggcgacctaattcactcgttgcaaaactttgacgatatttttttagcatatcgaactcggtaaaacctaaacgaggttcgatttctgagattttttgtatctttaccatgtgtttttattttagattacccccgttttggccgtcaaaccgttttttggggggaatgcttaaagatacaaaaaaggcaactaactcgcaatgaattagttgccttaaattttattattttaggaatatccctgttttaatgattggtgtctggaactggttgaggagttatactatagacatttactgaatgtccctgtatagtgtcgataatattaaagaaaaacttgttatctccctatatgccaaaggaatgagcgtgtcagacatagaagaggagatgcgtgaaatctatgagatagaactgtccacatcagctatttccatcatcacgaacaaagtcaaccaggctgctcaggaatggcagaaccgccctttggatccggtctatctcatcgtttggatgattctacctattttgacttttcagcctattaattgttttggtaacttcgttcattagcttttgattggaagttctaaatgtgttaagttctttgattatatctgctttattatagtataaattataccagcctaatgtttcagcagccaatatgcgaagttcttcttcttggctttcattttttataatgttcagtaatggctcaatagctttagcaataggtttatttcggaacctacttatttcgctttgtatctgtttggtagtactttccggactgtcaataagtgcaaaatctctttcaagtcctttcttttggcgaggaaggtattctaacaattcattcacataggaagaatcgtagaaagaccaatcggcagcctgtttcttcaattcattcaaagccatatcatggtcgaacgtgttgatagcactaaaaattctgaaacgatggcggttttcatgtccgcgtaataaatagctttctatccatgccggcaacaattccggattgcaattcttttcaacgtattccaccgcataacgacggatcagttcataactgtcgttcatggctgtctgcaatacatcggcaacctctgtcggatagttcaaagctaataggcgtaatgcttccaaccgcacaacgaaatagttcgattcgtggtaacttttcttcagcaactcaacgagaccactataatttgccattgacaattgacggagcgccattgcctgcatgtcagccataggggaattcagctgttttttccagaatgtaacatttccttcctgcgcaactaaagcttggttgatgtccatatccagcccggcattattggtgaagtgaaaagtcgggtcaccgatcagatgattttccaagaagcaggtaaaacgagtgaactgcccgatgcgcataccggcagctaacaagccgagaaattcatccggccatttatcttgaatggtgttaaccgtacatcccatagtagcaatggtcttacccttattgaatatataagagcctacaatgttgtcatccaaatggaaagaaccgttgaaacaagcatcgaacaatataaaacgcgcattaggagtcaaaagacgaatatcttcagtatagatatccatattacggtttacaatggaatccgattttattttctcctcatcgaaagcttccgcacaccaactttcaggcaccccatactgcttggcatattctttgatagcagcttcacgcccatgtttcttggcgtatgaaggcactttgcttcgcaagaatattttggcattctcaatactcaaattaataccggaaccattttcatagccattgatatactgcatggtggggccaccgtggtgatggaatagcatgacatctaatccttcgcgctgaatctcgttcaagtataatggtttcatcggatagcgcatgttaaaatcatagaacttcactgtattacccgatttgaatatttgcggcaattgctcacgtaaggctatttgctcaccgctccatgccaaaggatcttcagaattgtaaccatggccacgggccatagtcagttggtcaaatgcattttgctttgctttttcggcaactgccttttttaagtaatcgcgtagcatctgataacggttctcaccttctaaatgtaatggacggatacgggccgaataaatatccggtgaaatatactgtttagaatcagcacgcaatgtcatataatgatagtcaggtatcaaactgtcttgtttaatataatcaaattttaatccgaagtcatcataataacggtcggaaggaacgcttgatttctgccaattggctttgggagaccttttgaaagccgaagatagatgatgtgcatcacgaatcattggaatagggatgtcacctataaatacgcaaccctccaaaggcgttttctcattctcatgcaatttgacaagttgctcacgaataggttcgggccttttccaatcatcaattagcaagtaagtacctaaaccttctttttctatactggtacgataagcatcaatttcacttttcgcttcatcataacttttctgatcgactacaattgcaaaagtagtctttgtttttatactaggatgtacaactgtttgcgcctgcatatcctgtaagcacaaagcggtaattgccaaaaggatgtatttattcatatttataaacttaatcttttgattgtctgttcaagctctgcttttaaatcttccggaagattggctgtttgttgcatcttctttatttcttcaagaatgtgtggccgttgtacagaattagtaaaccaacctaatgcttcggccattactacacgtacttcctgtggattaccggcatcacgaattacattcaaataatcatccacgtggaaatggaatgtatagttacgcacattgcggattgcactgatacgttttgcttccggtgcagctacatccatcaaggtctgatggacttttgcctcttgtacaaacattctttccaggcttcttagtaatcgttttttctcttcgttttcattcaaacggtcaacttttgcataaaagtcttctattgtcttttctactttctctttcggataaaggcttaaagccttgttggcactcatttgtacgcgtaagcgttcattatgttcgaccaatgcttccacaatagcgggcaataaggaatcgtcacctacaaatccagcataaatggcactttggcgagctaccatttcataagtatcgttcaaaccttcgcgtaatgcttcgatgaagttgtcgtcctgataacggctcaacaacttgatagcttccatacgaaccgtattgaagccactttcccggtacttcttcaggagcaacggagataattccttttgggtatcggcgtcagccagcatacgcatggccaaactttgtacatcagcgtatgggctgtttaacaaattcttccaataggctttgtcatctttgtgtattgttatatcggtacttaaagtattggcttcgataggagcaaaacggaaagtgggatcaccaaacaaatgaccttcaagtgatacgattagcttattgtattgcccggctcgtacaccatgggacaacaaaccaatcatttcaatagtccagcggtcttgcaatacgttacgggtatttccttgtgctactaatgtctgaccgtcattaaagatatattgtcctgctatatagtcgttttcgtgaaaagaaccgttgtagcacgcatcaaacattatcatcttcggattagtggaaagatttctcttcattaaatcttccgttacgatacgttcatcagcgtagtgaagagagtctgcttcccagaacttaggattgtccaggtctttaaaaaacacctcattcacttgtcgtttttcctgcatctgaatacgtaaggtgtctttgtcacgttttccaacatgggacatgactgcattataaagtgtactcttcaacattttataacgattattgaaatcagtgcatgccaattcatcattaataagctgccctgttggcattccatgttcatgaaacataaataagtcaaggtcctttcgttgcaattcgctgaataacttatatttcatagggtgtttcattcggaagttccaatgtttgaatcccatttgacgaccaaaagctaatggaaagttctccatataagctttttcgtcatccatccatacaatcaggcaatcggaattgtaagaagcaccattgaatgagaatacccgatctaattgattatgcttatctgccttggcagcagcagctttcttcagatatgaggcaatggccgcatatttatccccttcctttttttccggatacttgatacgagctgaatagaaagtaggatttagccgctggggactgtcttctgtcaatttgtagtagaaatgctgatgatttactgagtcttgcctgatgaactcaaactttaagttcagatcatcataaaagcggtcggtaggtacggaagactgatcccaaggaaaggctttctcattcattttgaatgcagtagtcatgtgttgcgcattacgtaccaatgcgacaggcacatcgccgattaaaaccagaccttccaatgaagggcattcttgatatgttttgatgattatctgtttgacttgatctggattttgccagtcaccgctgatcagataagttgccaaaccatcatcttcaaccgcagttttgtactgatgcatggcatctttggtatttgcataagtttggttatctgttatgatagcaaaagcggtaggttgtttgaccaatggctttatgactgttgtttgtgcatttcctgccaatggcaaaagaaatgccagatatattatttttttaatcatggccaattaatttttaagtctgtaatatgtacggtcggcttcttcacgaaggttctcggataagctcttatcttttctcagttgatcgcatacccgaaggatgtcaggcttccgataagaatgagtgaaccaagcaaaagcctccaataaacaggtttttagcttttcactttcactggagtcggtaagtaaagccaagaggccgtctacacaggcatgtgccatatgatttttcagagaattgcaataaaggatgcgccaacgttcggaagtctctttgcttaataactctttttgcatgctacgactattattggcattctccaaaaccttacgcatctcctccttgtcttgcaacacataggtctcagccattactttatcaattgccgcctgtacggctgcctgatcaaagacttgaagccccaaactcacattaaatgccacacgctcggataggttgtcttctacataggctttgatttgcggataaacatactcgttcagtcccacatgttgcatcatacgaacagaggtgcgacgaataaattcataggaatccgtaatggccaagtgtaagacttcccggaagtttttgtcactaatcttctcaagcaataccaagcaggtgaaacgtaccatcatgaacgaggaagtttcaaaagtttttcttaataaatcagaaatacccggatagtcattgcgataaaggttgtgcaaagcaaaattctgtatgtcggcatagggcgactgtaataactccaacatgcgggactcgctatatggttctttgaacaaagcattggcatctacctcattgatagattgaaaacgtagagtagggtcaccggtaatgtgcgattcgagaatattcgtcaatttagcccattgccccactcgtgctcccatacctaacaggccgagcatctcgtttgccattttatcttgcagtacattgactgaattggcaaaagtagttacgcattttccttccgacatgatataacgtccggcaatgtaatctttttcccggaaatcaccattatagcatgcatcgaaaattaccatacggctattaggcttaaactctgtaacttccgacaggataataccggtgcgcaggtctagtaaagaatcttctgcaattactttgggatcatcatagcctgcaatccaagtagtgtccaaaccgtatgtgtttttcatcatatccagcatttcgtcgaaagactttttgttgttttgctttctacgcgctaaaccacgataatagtacttcattgcatctacatgagcattccacctattagtagcgggactaccggaaagatattgacgttcgggcataccatgctcatgaaaaatagacaagtccagatctgtgcgtttcagcatattaatgacatcgtccttgggataatcgctgaaattataacggatgaaacgggcccgtccctctttatcgaatacgcccggcatttgttcgcgaatagtaaaggtttccggtgtccatgcagtcaatgagttagagtaagagccatcacctgtataggagaagaattggtctaatttattgtttatctggtgctcagccaccacttttttaaaatagcggctgatttgcgcatgcggttcttcgccgttatcaacagctttgacacgtgcagaatatatgtcacaccgaatttgctgtggagattttatagccaaattataatagaagaaattattttcgacactgtcctgtttcaaaaaatcgaattgtaggtcgaaatcatcgtagaaacggtcgctgggcactgaagaatctctccagtcattgtttttctcatccattttaaaagcggaagtcatatgctgggctttgcggagcattggaatagggatatcaccgacaaataccactccttccaatttatcctttttgtagagcttaacaataactttctttacatcttccggtttattccattcattgtatacgatgaacgtaggcaacccttccattcctagaatctcctgataggctttaagctcggcttcacaagcctgaaatgtccctttatctgtaattacagcaaaagaggtgtcctttactttcacagccggtttaacaaatgtctgtgcccgcagagataatatgctgcagagcatcaaacttccagttattaatttacgcatgttttgtaatatagatttcgttatgtagcattaaaaattacatcctaaacttatcgataaatgagtacgcccatcataatcatagtcagaggtatttacacgatcgaatacaacttttgcaaataagttcatacgtctgttttctctgacttgttgcgaatacgttatcgacccgccaatacgatagtaatcacaggtataataattagtcagcccttgttgtaattcggttacagttggatagtctgcatggctgccaccatatacatattcacctcccagattattgttatacgcaacatgaacatctattaaaagcctgcgattcaaactattgcctaaaacaaaattttttttgccacctaagcctaaagataaattttctgcattctgtacagaattaggcattaaatattcatcgtcttgcttggtataattcacatttaattctgctttccaactatattcattcccgcggtttctgcttaatgcataattaagagaagcggtttgtgccttgtacgtagaacggatgttattatataattccacccagccactttgtgattcagagttatcgcgttgagaaatatactgaataccatcgatgttacgatttgtatatgtggttctcatataattggtatagtcctttccttcctgaatcatcgttaaagaaacatgagcagttttatcttttacaccggctatttttttaggagtcgtatagctctgctgaacagtttccgcttttacatcgtaactgccctcaagcagtaaattgaaagagggcatactgaagttgtactggagagctccaccgaaacggtctccaatataattgctggttacaccgctgcctattccttttatggctgttcccaaaccgtataatatataatagtcctgatccacataagagttgacattactcattcttgagtcttccttgatagaactatacttgaaacttgcaccaaacttgtgtgaattattcaacttgtaagtaatccccggcgtcagtcccagcgtataaaaacgggtatccacacgcgggtcgcgctgtttggcagctaatgtagctacataattaccttccaaccccaatgcccaatgattaccaagtaaaggagtagctgcacgaaacttcagatcgtaatattgatttctccatttgcttaagtgctggtctgcgacatagtaaggcattcccctgaatggatcggcaatggaggcgttatatccggcatctgtcagatttttttgtgcaaaattaaatgctccccacacatatgcatttttcagattgataaagccttcactggatacacctacgatagcctctttctgcccctcttgcggacggcaatagtttccgtcctgtaagtcatatcccaatataacattcgaataattctgaatatcatcgaatggcataccggcagcattctgtgaatgagaccatagtcgtcttgttttcaattgttccatagcggcgggagagaagccctgtgccgctcccaccatacttacaaggcaggctatcattaccagcaggcagcttttcatatagttcatatattgttttttcattgttctgtctttttagttaattattacaatgtgtgattccatgaaggcatttttgctccattacgacgcattacaggaacaacgccacgttcaaagtcatccgtactgttgtttgtatcctgatatatatatgtacctgtttcttcgcgaataataggattaccttcttcgtctgtggacaatttgcgagcaatacctaaaccgcaataagtagctcctacccaagtaatacctgcatcaagtacaccggggacacgttttgcattcatctttgactcattgtttactgcttcaacagcatccaatacatatttaataggtatttttgcataataaacattgctgttcggtttgctaagatctgttgtcttcatattttcatcgttgaccggatcccaagcttctccttcaggaacacgaaaaatcacataagcacctccgaatacggatgtcaaatattgtggtatacttcccatctctgcttttccttggtagaaaacatgttgcatatcataagctgcctggtcagggaagtttggattattcatattaaactcaaactcagaactactgccgtctataggactttgagggttatagatgtccaactgatggttagcggcaaattgagaaatgatgcaagattcacctggcgctaacggatattcggttccatttcctggaaatttccacacacgttctccatatgcataattattaccgtccgcttccggccaaataggtaatttagtggtagctgtacccggagttaaatttgcgaaataaataccgtccaaatacaaaatgtcagcagagttattgtatatctcatagaactggtctcggaaatagactcctcctttttccggacggctaccgcaataataaatctccttgaatattaatgggctcactttaagcccttgtacttcaatattcaatgcgctaccatgcttaaataatgccgcatttacagaattgccattgatgtagtattcattgttttctgtatcgatcgctgtaccggatactgttaccgaataaattccggggataattccgtcaactttcacactattatcagttacttcttttacataatgtaaatcttcatcgtaattgtcgaactttacagtcagatctttcagtgtggatatattttcaacggtaatatccaaatatacatccactgtgataggattcacttctgctgtgccagacatgtccctgaacgaatcgcatcctatcaaaagggtacttgccaatgtaaacaaatatattaaatattttttcataacttcctaaacattataaagtgagtgataattccagcccaaagaaaaatcggttattcaattgaatatatgaacccggattacgtttggattctctgcgcggataacttctgaacatattgttggcaaagaaagaaacacgtagcatattgctaatttctttagttacattcaagttaaaacaaaaataaggactgtatgattcttttatagcattattatgacttacattattcaacatatatccatatcctgcatcctttacttgctgggtagtggtatatttccccttgggaaacatatttacagacgcatcttccaatgctaaatagcccacaggtatagaatcgtttccaaatgtattccaattagactgctgccaaatagcttgtgctgtcatcgtaacaacaaaaccgatacgcgggatattgtgagtggcacgtaaagtcgttacaaattgttgtttgtaacttgcattgccttcttgagaataaatggccatcggtttacgggctgaagcagcatcttcgctattgtcatagaagctataaccctgacgccaactcttagtacgcatccatgagccatttatttggaaggccgtacggatagcatcaatacgtccgatattcaaatcaaattctaaacctttagtttctatatttaaattattagttggttttgcataagtagacaataccggtaggctactactaagctctatcccgttttctgtgcgctggtattcattgtagataaatgtattgaaggtgttgaaggtttggctcattacataaccatccttcagacgctccttataagctattacattcagattggttttacccactcgtaaattaaaaccgacttctgctttatgattttgggcaatcttcaaatctgagttatctacttgccgaacttctgtggtagtcataaacaagcgctggctttccggaatattttcattggtaagctcatttatattgatatattcaaaatatgcattttctggatataaatagagaagagaaggcatctttgcagcaataccgtaacctccctgaagacttaatagattcggaatcaaatcaatggatgcatttacacgtggcgagaaaatgcctcctactactgaggtatgatcataacgcacaccagcctgaatgttcaaatcatgcgtaccgcttatggaccatttgaaattatcttccacatatgcaccaaattggttaatgaaaggaatatccttatagttacgtggacggaaagatgaattatgaccgtattgactacgataaggaggagtacttgggtcataagtttttcctttaccaacgttaccgtcactccggaaatccgcaccaatcaagatgcggttgtttacatgaccgctcgccttgaatagagaactcgtcactttagcaaacaaattaacttcacgactatcgatctcatagtgtcccaaatagctgcttggtagataaacagcataatgatttatgtcttccggtccaaaattagtaatttgattaccattggcatcatagatatgctgacctgcaaagttactaagtaccgcaccgtttgtagtggtcatggaataaggagatgtagcagaactgtatacggtttcataataactgtctttatccatatacgtacctgacaatacatagcgtagtgtttttaaccagcccttatttatattccatgtaccattggtattcaaagtaaaacctatatcgcggccttccgaagctgttttagtttgttcatcatcaggattacgttcacgttgatccttaccataaataaaatcaaagctggaattggtacgtaacttattattaaagaaagtatttgaatagagcaactttgttgtggcacgctgatagtgctggtaactggatattggattattcgtattataagcataatctgcacttacatttaaagcgcctttcttttttccaagttcaaaaccggttcccatagacacctgatagatattgggattggcttttgctttgacacgtagcggctcacgaccagcttttgtattaataattactgctcctgaggtcagatcaccatattcaacagaagggataccacgaacgatttgtatagactctatattttcagtagaaatactacgaacatcggttccaccagccggcgaggcacctccggccaatgaagcgggtgtttccgtaccacttaataccgtagggctcatcgcagatagattagcattatttgagatgggggcaccatcacgaattattgcggtgcccatagcattcatcggagcttccggaccactggaactggaaacttgacggatgttaatctgttgtgccgaactcatatcttgattctgtgaaattccacctggcatcaatgacattacatcatataaactggtcgcttgcatatggtccatagcagagcgggaaatgtgagaagatgtggatttgcctgaacggctgttggttgcagttactgtaacttctttcaacttaaaatcctcattcctcattgtaaaattaagaaccaaatccttatttacatttattaaggtgtcaatggagactttgcccaaatattgaatttgcatacgaattttaccagtaggtacgttttccagtatgtatctaccattttcatcagaggttgtccctagtgcaatttcaggaatagacacagctgcaaattctaaaggcaaacgcttgttgttgtggtcgtactcataaacagtgcctgtaagttttactttgtaattgttttgcgatttgatagggagggcaattcctatgcaaataagtataaacaagtatataatattacaccccaaaataccttttttcataagtaacatcatatttattaataatgcaaaattatatgtaaattttaaattaaaacaaaccattgtgtgtaacaaaactaaaattattaaaaatacatgttgtttttgttggtgccgttgcataatctcacagacctcaaccgtctgttgtctaacaatatagcaactgcattatatttaggaaaatccaatatatattagtactttatttaagttccatacatagtaatacggatcttgagtgattaaaagcaaactgcaaatctaaataaaaaacgggatggttgtagttctgatatgctatatcttaatacaacgcagataaatacttatattttcattgatagatctaactaagttaaaaaacggattttctccaaaattcttctgatagctccgttccagcctcatatttatcgcactttacagaagccccagttcaaatataaggaaactgtatctctcttcgataaaagatctattttaggacgcaaaattagatattacaaaagattataaaaataccattttttgggtataaaaacgcatctaatacctatatataggtattaaatatcattggcaatgtatgttccatttcattaagcaaacaattttttgtataaaatacaaatagtacttttttacccacttaaaaagtgcaagaatgtataaaagtccatgtgtcagctataataggggcatgaataggcatccgttccatacctgtccctatttgaatcggtcaccccacagtgaccggacattactcacccaattcggattctcattacagtaggcaacgaaaatctgtatcaagttccaaagcccgagaatcattccattaaacctggcaggaattgtgacaacatgtctgcttgaaacagctactattatggtatcatgctgtattgttatgctatataccatgttctaagtcaaaactctttttttttagaattgaaggtttaaggctccatccgaaagtcaatatcactttctcaaaattcttttctacagcaccctttgtataagttaggatgtctttctctagaaaatttttgaaatcagatgaactcatgtctctaaaaatgtttatatattcttttttaagaaattcatttatggcatgtgccgatatctttttttgcgtgcacttttctataacatataagttgcttggtaccggtaccatcgtgtccagccccatgaagatattacagtctaccataagagtataagcgccgctctcggcaagaggtgcggaaatgcagtaattggcttgctcaagcagagaatccaccagttcttttgtggaagaactgatactattggccaattgttcatatcctcttagattcagttgggatatggtcttttcgatagccgggatgaatttcattcctggacccaggttcaaatcaaatcttttgtaatagacaagaagctcattccaatctttgtaccgtgaaggtttgatgatatttacattgtctataccatgttgtttaagatactcgccggaggaaaatgcatcttctttgaaggtctgtgtgtttccatccgggaaacttaaatagatggtcttatatgtgtctccagtgttggtccttgcaaaagctttacattcctcacctttgagataatatgctgtggtgatgtcaaaaccattaccgctggcatcattgtcatagcaacaattccactttaccttatcagatgggaatatacggcttatattctctatttgggatttggtgacatatccccccgtgcttatgaatgcgcatgtggtttctttagtataatggtttatttcgtagaaactcattgcgtcaatagcggattcaaagagatatatgtctgtaaccttgtcaaaaggaacaaaattggccatccaacagctttgtgccttgtcaccacccgtggcaaaggctttataattggtattggtctctgcaaaatagttcctcatttcaaagttaaggatttccatctgggagggtttgcggaatggaaagccgatatgattgttttttcctacctggtagatgaacagtctattggcgaaatcctccacagtctgtggagagagcttcctttggacggtcaaatatggattatcctttttgataggacgaggattccaataattcaaattggattcaatatcatttggattcagtcccagcagaggattgtttaccgtttcggtatcttcattggtgatctgttgagtaggcattggtacaccatcaatgacgaagagaggctgggttcctcctgtgacggagttgacacctctgattctgaaagtcattccgcttgacaatgaaccgtctgtggggataatctgtactccgctgattttgccttgtagtgcttgcaacgtctgcgtagaactactgtttacaatatcttttatattcacagaagcaacggcggttgcaatatcactttttcgctggctaccatagcctacaacaaccacctcatccatctctgtgactgaagggtctagaatgatatcaaatcttcggttctttccgatagtgatagttttgggcttatatcccagataactgatgaccagtttttcagaaggaagtacttttatcgtgaactttccttctaaatcggtgattactgcattggtggtaccttcgatatttatcgtggcaccgataagaggttcactcttctcatccaacacttgccctgaaatagttacttgctgtgctaatgctacagtgaaatgtagtattagaaacaatgtgcttaatagtacttttctcttcatagtgcagatattaaagtttataataaggattaatacaattagatttaaaatggtagtgcaaataaagcgaattataatatccatgttttgacctattgtacttttctcttgaccaaattacagactttttcttcaaaggtaatcgctttctattaatttcatttatcaccgcgtaaaattattcgattggactttttatagtgagtattatcatggggagtattaaaaaagattggatatgaaaaatagtatgttaaatcattctgttttctcaaatatgcagtggggtgtgagcgcaaggaaaaatatctgtagaaattgataataatgtattttattcaaactttccatttatccaaactctatcagttatctgcacttaaatcaggctttgatatttcaagagtttggataaatgattaaggattcagtctgcattaataccgaacatagcagtcagtgaacgattgataccttacgttcgcatcgtgcgaagtctattcctttccacacggttttgcgtccggctgaagatgcacactcggcttgcgccttgttcctttgctgtttctttatacttgaagttctacaattcgtttcacaaagaattaccctgtggaagtctgcccgctttcgcgtagggtgacgttgaaacctttatccagggcattacaccatggcattcgctttctccacaatcctttacccgcacctcattcggccgctcttacaattggccacccatcggttattggctgacgggagagatacgggcttaccaagtttcgcacaaataactgacgaccgacttagactccgcctatccaccagcagtgcgacatccgtgtagcacgatgtaacagcgtactatcctgactgcttgccttttggaatggcccataaatatccgtgagctaattcatagtcacgatggtacggcgattcacttaggttactcatatcagtcagctttgacattcttcgcctatgatgcttaggttggaacgtcgttgtcaagagggcttcgcacccgaccgttgccagtcacgtacgcctcttcaggctactattgatggaacaataggttcagacacgatgctgaacaattacttgtgtgacctcttggcgcacattacactactaaggtaatgcttttataggagaagtcacatctgtaaaaaacttattatcatgcaattatcttactttatcttaggctaaaagcccttattcaaggtgtctgtatcctatcatccgctaccgctcggtatcggattcctccagaccgatggcatggcatatctcctccaccagttcaggaaggccggagtctttctcctgacggggatcgggtggaaacagcgtggaacgaaagacacccttacagacagggtccgcctccttgttgtagcggagggtgttcggaatgtgtgaggacagcagccgcagccccatcctgtggatgacccggttccaggcatcatacaaattcttccgtccccttctatccaccatgttccagaacagccggattcctttcaagttgcagttccccttggcgatcagctcctcttccagcaccttggtaaactgcagggaactctgcatgacgatattgtccgccttgagcgggacaaagatatagtccatcgcggcaacggtatgaaccaccccctcgctgcggagcgttccgggaaggtcgaagagcacgatatcgaaagtctcccctttttcgtccatataacgccgcaggtcttccacccccttttccgggtcgcttttgatgaccggataggcaggcttacggattctttcgtactgccggtacaggttcaccttcaggtcgtcatttttcatgacattctccatgtccctctcacgcatcagggcgatgctgtgctgcggggagtcacagtccacaaccgccacacgcacgtctttgcggtaatgcaggacactggccagcagtaccgtaaagacggattttccgacgccacccttctggctggcgatggcaaccaacaactctttttcttttttcatcatacttctttttcattaaaagttaaacactattgtttcagaaacaaaaataatgctcccatcgggggagatcccctgtcatgggggacgagcctttatgaccgggccgggcagggactcctccagaatcatgtccgtcgtttccctgtattcttccagatgccgcgagacaaggtggttgatgaacccctccagagtgacctttccgtttctcgaggctcccgccaggatggacagtttccggtgcagggcggcgggaatatgcagcgaccgacgctgcacgcccgcaatgccatgcaggtattcctccccgtagacggacggttgcatggggccatttttccttgcgggacgtataatgtcgttaccggacgttccacgtctcttccggggacaggcaggcgcttcccccatgatctcacggatgcggtccgcgtccatcccgccaagaccaatccgctcttttacgttctttcctgtcatgatatgccttcttggacaatgacaacgttttatcggcgaggtgttcctcccggctgtccgtcctcatcccagggacggtagacctcaccgagcagggaggcgatgtcctccctgtgttcctccatatggagttccaacaaccggatgataaaaccggagatgctgccgcagccggcggccctgaccagcatggcgatccggcggtgcagtctcccatcaatgtaggcggtcttccactcagcggctctgggagcgggaaccagaaacctcctcttgtattcctccggacctgtcactttccctgcccggacctgacttccatgacttggtatctccaccactggttccagggatggggaaacgggagctgacagaaggttccccgtgagtccgaccctctcgagaacgatatcggaaagccggttcttttccttttctgaatccatattttaaaatcttaaattattaaattacacaactggtattgtctcggaatacaaaataaaggaagaagagaacaggatgaaaccacctgtcacttatagtcatccaaagtcagttattgtcatgatacacatgacgggggggacggagatgccgttccgttcggacggttcttcctatgcggaggcgacatcagaggcccgtagtggtgtggaaaagcgagcgggattccgtttccttgtccaccgttcctttttaatccttatgggcaggcgtgagagcgcgcatccgtccggatacggattcttaaattatcggtctatgggagtgtaaaagtattaatccgttaatggagaattatgaaggaagaccataaggtgtacacggctacattctccatttgcagaagtgtagaagtagtaatccattaatgaagataatgcagaaaaaccataaaccatatacggctcactgccgctctccatttgtagatgtgtagaagtaacaatccattaatggacaatagggcatgtaaagggcagatttcccgtatattcgcctccttattcccgaattatggacgtaagtcatatgattatggagagatatccacccttttatggggagagcagccggcaaacacctgatggaaatgcctcgtaaatcacaggagaatagccatacaatgggctaatacacaataattattggataaatgtggtccgctcctgcggacagcaagttgtgttttcgtttaacgaaaacaggacggtttaacggagaatacaccgataaaccgttacttatttcaagctccagcgtcgctttttacatatctaattataattcatttgaaatcacaaaacagattgaaccgaatgtggttagtttgtctgtttatttcatgtccgaatcattagtatgctatgttgcaaagttcgtattcattatgaaaaaatccgcttacgagaacaagatattcaggtaatttgccatcctttccccaaagaagttcgatgttaaaaagttcagaaagcgttttggctatgtcaaatccgaaggcttcgagtgacggacgcactttttccgggtgtcggcatggtgtgccgcagttacgcgtacactcgttatctgagcagtgaagacatttacctatataggcaaatgaacgccctccatatttccgttccatatccaataattcgctctcgattcgtatccgttccggtaaaatgagtttttgtgtatattcaatcggaatatctttgtcttcagggattatcttcgttgccataagatgtgcatacttgtattgtcggagaaacgattccgtatcaaaatcaaatggaggacacccccaacttttaccgtaattggtacattgtttgcaaagttcaagaaaatgtggttcgtcacggaattcggcgatgtatccttcaacagtgatgtctgaagtaaaattttctacagtgtatatactcattgtttcaaaatcattgtaccgcataaggagtcgaaacggatgttttcattttggaaaagtctgtcaatgtatccgcttttctgcatttcagacgcggtcaagcaacttaaattcggggtatctaacaatgctatcgaatcgcacatggacaacgcgatgtcaagttcatgtgtcgagaacatgatacattttttctcgtcgtggacaagcctacgaagcaacgccacaagttcgtagcgattaggcatgtcaagaaaggaagtcggttcatcaaggagaatgataggagtatcctgtgccaatgcacgagcaatcatcacacgctggcattcgccatccgacattttatccatcgtgcggtttgcataagcctccattcccaccgaaatgagcgattgcatgactatctccttatctgtttcttgcatcctacctatccagttggtataaggagcacggcctatggctacgacatccttgcaccgcaggttggcgatgcgcgtgcgctcggtcgtgacgacagccagcgtttttgccatatcttcggttttcatgcaggcgatgtcgtgcccgtcgagaatgatttttccggaataacaccggttcagaccggctatggcgcggagcaacgtcgattttcctgtcccgtttcttccgataagggctgtcagttgacctttttttatcgtggcatttacctcgtggagcaacgagttttctttgtaacctatggaaaaatgctgtaattctatcatgcggtgatggatttgttgcgtaaaaccacccatacgacgattgggattcccaatagagctgtaatggcgttgatcggcaaggtgaatattttagaaatgatgtcgcaaagaagcaatatcgatgctcccgaaagaattgttccgggcagaaggacatgatgatcgctattttggaaaagcattcttgtgacatgaggcatagcgagacctatgaaacctatcggaccgcaaaaagcggttatcgttccggcgagcagcgttgtcgagagaaacaacaggctgcgtgaacgccgaatattcagtcccattgttacggcatattcctctccgaacagcaggaggttaagcggtttgatggtcagtacagccaacagcagtccggcaaacaccgatggaacaagaatcagaagttgtccggaggtgacgtcacccaaagcccccatcgtccaaatgacaaaggctttcagcgattcctctttgctgaggtactgcaatatctgcacgacagcacctacgcccgatgagaacatcatgcccagaatcaggattaccatgatgtcttttattcgctgtccgacggcagttatcacgagcaacacgacagccgcacccacccacgctgctccggcaatgcctattgatgaaccgatcccggcaagtaccacaagtgccacaccgagacttgcaccggaactgatgccaaggacatagggaccggcaagaggattacggaagagggtctgcatctgaagaccgctgaccgataaggcagccccggccaacagtgccactatagcttttatgaggcgtatgttgagtacgattttttccgtggcacgggaacaatttcccccggtcagtgctgcccatacatcgcggatcggaatgttgacagctcccacggccaagtccagtaaaaaaagaccgaccgtgagcgtaatcaatatggagaataatatagtcgaacgggaacgcatctatttcagttgcttgtaatacacacactcttcctgcaccagttcaggatggaatatcttcacgaggtcgcggagcacgatgtcaggattcacgacggcagactcgtaatagtcgttacccccggctgtgttggtacgggcgttgttgttatacacctctccatttttgaaacatcgggtatcggtgaatttcggacatgatgccttcaagtcgtcaagggagttcgccattcccacgttcaaccacatgtccgcatccgacgcgagcagatatgcttcttctaagtcaatggggatagaagcgtttcccgtgttcttctggtagatatagcggcctcccgcatcagtaatcaagcgggctacataactttgggttgaaggcatgaaccacgagtcgccatagggaacattaagcataaccgaaggagtgccgagggtactgtcggccactttctttttcaaggcgttgtatctgaccgggattgcggcaaaggctttttcacccttctcacgttttcctgtgacttctgaaagcactaccatccattcggccttgccgagaggcgactcttcaagataatcgccgacatacatgaacggtatgtcgagttcttcgagtttgctttccattgcgcttgcgccgttcaccccatagagcagaacgaggtcgggatcgagcgagagcagcaactcgtagttgatgttcccttcatagccgacatcgccaatactgtcgcggcgggcttggatgtctgggttggaaatgtagtcgattcccgaaacgccggttatacaccggacttcaccgattgcgtcaagcatggcgatatgagtggaagacatcgccacgatacgtttggcgtctcctttgagtacctgtcctgcaaacccttcgggaacctcttcaccgttgcggacgataaacagccatgtggttacactgtccgctccctgccagggattcctgacggttatcagtacgctttccttcccgcccgcccctttgatgtcgaagccggaggcatattcgggagcataaagcagcaggttgaaatcattgatttttgagcttttgttgtggcagcctgtaaatgccagagaaagcaacaaaatcaggcttaaattctttaatgcgttcatattgatgcagattatcgtttactatttttgttttttccgaacttgggtgttatgccgatgaatatctcgaaattgatgcccggcatgggacgggacaatacggaaaggtattcttcatcgaacaggttgttgatgctgccctttagcgacagatcggcccatcggaaagagagctgtttttccagtgtcacgttattcatgaagtaagggggcagatagcccgtcagggtatagtcattactcgacatggtataacgctggctgtaataacaccatttgtaaagcaggctccatgtccgccatgacagacgtccggtcaccgttgcggaaaactccggcacgtatggcaactgtttgccgacggattggtctgccggactcatcggttcgctctcgttgatcgagggagtccacgagaaagttccgttcatatccagtttccagtcctttccgagcattatatcaaggtgggcgttggtctctgccccgtaagcatgtacctttttgaggtttctgggggagaagaatcccttggttgtgggtagccagatgatccagtcgtcgatgtgcgaatcgaaccagttgataccaccgctcaaagcatatacattttctttccccaccgagaacgacaaccccacgtcgtatgtgaagccgtgctcgcttttcaggtcgggattaccgcccggcagaaaatagaggtcgttcagcgtgggaaaacggtagttccgggagatggatgctttcgccacgatattgccttttttcgacagtaccccgtcgatgaagaaagccgggataaccggggcccattccgtaccgaacatatcctcgcgaaggacaagcgaggcggcaaaacgatcgacaggccgccatttcgcagaaacggaaccggaaaactcgacacgtcccttgtcatacccgacaacagccttgttaccttcctgcgagatgatatttttgtccgcgctttccaccaaatgctggtgtacggaaacaccggccgtgaacagccatttctctgaaggagcataatccccgtccgcacttccgtagaacgtgttaatcttactgcgtgagcgggtcatcgaagccatttcgccgtttcccttgtcccgcttgtaatcataggccatccatgtgtgtatatagccgccttttacaccgaccttccatttctcccgcacgcgatcccacgagaggacgccgcgaaacgtctgctccctttggcggttctcgaagtccatgtcgttcccgtaatccgtgctgagcatcgccagttcccggttggaattgatataccaggcgtttagcccgaacttgtcgccttcgcccgtgttataataaatttcctgcaagacgtgcagatccttataagccccgctgcggttgcgttccgtcgggtaataggaaccgatgatgttcttgtcctcgtcatagatgttttccttcttgtcccggtttcggtatttgtagtcgttgggggaagaggaatacaccacacgggtggaggactgccagtgtttgtcaccgtaggtcaggcggagaaactcgtcgaacgtgctgaacgaccccactccctgcacgtactgcaacccgaacccttcatggttggccggagaagtggagagcctgaccagaccacccaagccgccgcccgtttcgtttaccgatgacgttccgtgcagcagcgaggcatcatcgataaagtaagaagggatggtggaaaaatccgtcatgcccagcatcgggttgttaatgcgcataccattccacgtcacttgagtatgcgagggagaggtaccccggaaagccacggtggataacgtggcgcgtccgtagttcttgacaaaaacggatgagttgaatgtcagcacatcggccatagacaaggcgatgttctctttcatggcgatggaatcgaaacgggttcgttgcacgcctatatccttcataggtcgtttgcccaccaccgtaacctccggaatacgtagtacccttttggtaatgctgacggaatttttctgctgggcggcaagcagaaagggcaggcttacccccacgaacaatagaataagatgtcttttcatttttgtcctccttcctcgttatttccagcagaaagctcccggaatgattcccacgtaaaattcatcgatcagcttgccttgcggcgaatagcgatacacgataccttgttgctggtaatcaatagcgtcggccacatatacctccccgttgttgggattgaccgtaaggccgtagtatttggtgtcccgaaactccagaaaaggccggacgggaacacggtcggcttccaccggcattcgccaaatatcgttgttgatccagtaaagtgtatcccgtgtaccgttgagctggacttccgaaggccagtcgcccagcttaaacttgaactgtttctctacggtgaaagtctcggcgtctatacgatagagagacggtgcctcgtaaccgtatgggctgccctcgtaaccgccatccgtgatggtccacatcttgttgtatttgtccatgaccagcgaagtaggttgtatgccgatggtcagttcgtccacgaccttgtccgtctccgtgtcgattttcaggatgcggttctggtacgaccagcagttcacatagacgtacttgccgtattgtaccatttgttcggtggaacccgattccatgtccatgtctggacattcgatatagccggtaatctcgtatgtcttggggttgatgatgaagatacggtagtcccatatctgcgtcacataggctttctcatccgacagaaaatggatataccggggtgaggtgaaacctgtgatacggcccacttccttgaaagtattgatgtcgatggcgaaaatcacatgcgagttgttcaccacgatccagcctataccgtcccggataaccatagactgagccacatcgcccaacttgaacccgttggcacggtaaaacacttcattctccacttcgcacgtggcgggatcgtagtaggaaagcgtggcattgctgtactggaaattcccctcgttggtaatgaaaagaccagaggccgatacagagaaatcttccatctctccgtaatcccatttcatgcaactgccgaaaactggcaggcagaaaagaaaaaggcaaatccgttgtattgttctgctcattgtcattcggataaaaaagagtacccgaatcattacgggtactctggttaaggtataaggtttaatcctgctgcgtatattgtttgtccttcatattttggaaggttgggttatacccacatttcgtcacgctccaactttcccccgtaatcattccgttttctataaacttgccgaagaaagtgtagtcggtaaatttcgtcaaaccgtcaaaaacaaccccatgcaaggtctccaacttctccatggaaagtgtttcctgagaaagagaagtcgcactttttatctgtagcgtaccatctatagtctgtaatttatcacaagtaatgcctgttgctttattaacgaacaacccttcacctcctacgtgaagcaattccggaatatccagcgatttactttgtaaagatattgctaacgaaccctctccctctttataatatacaggagaagctgaacaacaaactttggatagtaagggcaagttacaactggtaaaatttccagataaatagaactgtcctcccacttctttcaagactggcattgtgattgaagcaaacatgggtatttggatatatccatatccatctatgatttccaagtcgggaaatttggcattgcttcgcatttggcctgtcacatttagatttccatatacatgttgaattgtcgatatggtataatcggtattgttggtggttggcttacaagtgaagtctttgatattcttgaacgtgatttcagggaacttattattcgtgagactggtgatgacaaaatttacatttgacaaatcttcggctgtttcaattttggagagctgcaccttgtttataatttcaatctggggcgctgtttctccgaaggtttcaaatcgggcgttcggcaacagcagtgttccgctcacatcttcaagataatccagcgtgatgcttccaagtgtggtgatcttgctccagtcgggaagttgtttgagtgccgtgaaattctttatctttatctgtccctttatcgttgtcagtttgtccattccaccgaaagcctgaagcacgtcatttcgttggggaacaaaactaccggtaggaggagcttccatattggcttccataataatacttccgtttactgtttcgatttccggaaggttgatggtttccaacatcacggggacggtatggaaatcaaggccaccggtctctttcagcttaaggaagctcatggaagtcagcttggcaagattgtttacggacaagacccctccgacacttgtcagttccggtatttccaaagacgcaatcgaaccggctgctgtgttctcttcattgagtccttgaagattcagatcctgacctacagtagtcagaaccggaaactcaaaactctgtaacgacgacgcattgaacatcacgcttccttcaatagttgccagtttctcgaataggacatacgtcacttggtcgttatataccgatatgtctccggagagcgtttccaatgctttcatggaaatcatgtgaagttccgtagctttcgaggcgacatcggtcgaacctacctgtaaacctccggcagaaacgatattatccaaccctgtcaagtctgcaccgttgtaactgttacgaatgacaatgttgccagtaacctctttcaaagatgccaatgcagatatgtcagtgattttttctgcctcttccgcatcagagccgataatcaggttccctttgacaacggttgttttggttgcggcaaaagaagctacctcctcggtggtcttcaactccacatctccgtcagattctatctcgcttttcacgaccttataggtatattcgcgggcatctccgttataggatgtcacccggaaggttcgttcgttatcccagtccgttaccgtttcaggatcaggtatgattgttgcagaagttgtgtacttgaattccacttcggcgttgttcagcgataccgtatagggaacggttattgttactgtattgtccgtaatgtcggccgtgtacgatttcccgtccacggtcatcacgaccgatgtgatgaaattttcatctgcatcttcaggtataatttcatcgtttttgtcacacgctcccaaaaagaacaaggataggagcatgggaagaaaataaattttcatacttgtaatttttattatttggttagatcctcaaaagaaaatacctccgtagaaacttcgcccagccagccgcttttggccagaacaccgcattgtattttgataaagtcaatatattgcagattggcttccgttccatcggcatggatggcattggaaattttgaaaccgttcctttgtccgcttccatccaccgtactgccgccttctatctggtcgtttccgaaattatccacgtacccccagtcataactctgattatcccaataaccggtttgagaatcttgggtgttgcgggcggccagacaagtgcctgtcagggtataactgttttccgaaatccaagccggataataatagtcttgtgtatgataagcggacagatagtctacccagccgtttctaccgtcggaactgatccattggacatccatttttttgccttccggacggtaataggtcacttcaaaattctgtattgtttcttccttgcctgcttcagatcctttcagttcgtaccactcgtcatccggcaatccgtttccgtttatatcttgcatgacccatacgatacccggttcggaactgccgtcaaaggcgttcccctgaacacagaaatcatattggttacccgaattgggaatactgtggtcgaagccgacgatgatataacctccgaaagaacctaaagagacgtgcagtttgtctttcaaacgctgtgttgcccatgcgacagccgcttcaggggatgtttcgttgccggtcataccgcctatcgtgctcgtctcgttgataaattggccgggagctggggtatattcatagactttattccagagcttggaacttcccgaagcccggaagccgtcttgttcctttttgtccacacaaacgacttttacggtggcagtgacagccgttttccctttgtcgatattcctgcttattttttccgtcggtgtgtcttccgacacagtacaggagacggtgtattctccgggtgcggacggcgtgaacttgaacatgcgttccacttctccttccatgacctgaccgtccacactccactcaaaacggggattgtcgaaatactccaacaacggacgcaggaaaacaggacggtcggcaaaagtgtacctgtccgtggatgtttgcaggtaagacggggtcgggaatttgacaacgtagggcatcgtttccacgacctctacgcttacgtctttcgttgttgtcccatctatattggaagcgttgattgtcaccgtataaacaccgagttctttttcattgaaagtataagtattctcggtggaaacgatttttccttcccgtacccattcgattttgaacccttcgacatccgaatgctgaatatcgggagtaaatgtgtaatcggtattccggacgacttttagcccctgcgaaggtagtgccagtgagatgaccggaggggtgagttctttcacttctactttcagttcctcttcggcatagccttccgcattgtctactcttagtttgacataaaaatccccgcattcattccatgtacgttgaagagacggacccgaagaaaccagcgtaccgtctatcgtccaagcaaaaagagcatcttcaacattctggtatgtcggggcgatagtcaattcgtgatcgaccttgaccgtgtaaataccggtctcgctgtcaagttctattataggttgtcctcctacttcttcggtaatgacttcatccttgttgcaggaggtgaacagcatacaggcagaaataataaaatagtgaaaacgatgcatgatgtgtggattttagaaaaataacagggatacccccgacagaagggatatccttgtattctttttattgtatggtgatatcatcaatacagatataagccggagtattcaaaccgtatgctcccgaatccgaaccctcgaagttgaatttcacactttgcaccccttcggcattgatttcccaataatcccatgtcgtgataggatcaacctgttgttggccgttacgataatcggctaaaagacgtttgtaagtgcggatcagaccgccattcgcatcataacattccagattcacttggaaataccctttcatctctttcagaggagtcgctacccccgtagaaccgaactgattaccataagtaatgacaccataagtgtatgaggtgttgcagatccacaggccgaccaatttccggggaacattgaaataaaattctggtttagccatccatgcctgattgtaagcatccacatatccgtaaacgacaccgaaattggaaccgctgtgcccggcttccttattctgtccttccgcttccaccgcagtgttatagacagaacattggtttagataagaataccaccagtctccggtatttcccgactgattggagcggatgttccagttggaaagtgcgatgccgccgctggaatactctgtgcttccacctacagtattaaacattgaaaggaagagatattcttccggagtattgtcgtaaatggtggttacttgaggatacccttggtacgaataaagattttctccggccgaggtaggtcctgctaacatgccgggatcgaaatcatcgaaagtgatagttaaagtaccgtccgaatttgtcacagcacgggtttgcgaagttccggaatcaaccgggtccatcaaaaagtcatcgtccgagctacagccagagaacaaggcggttgcggtaaatagacaggcacctgccagaaagcgtaattttcttttcataggtcactcattttaatgtaaaacatattattaacaaacacaaaaaattcccgttcgtgcggacttacacgaacgggaatatgtctgtcttcaaatattgaatggccgatgagctattccttatttgattacgacccgtatatcccgcaggtgtaaatctcattccggtcatggcaggtcttctgactcgtcccggtcatcgtgccttcccggtattacaccagtggcaaaagttcgatgtccgtttttgtggactcacagcagcgggtactgtcccggattttcaccgggttcccttttcattcggaaggcgtaaacctcccgaaaccatttcccgactgcaaaattatctatattacatatcaattccaaataattcataatatttataataaaacacacaaagcatgacaaccgtactgttttaattagagcattcaagtttacgacaaacgaagacggtaattatcatacacaatatccataaaccaacaaaacagcttgccattttccataacaatgcgttctggaatagataactgttagctgcaattatgcaagcaaaaaaagcagacagaataatgactattaatatcatgcaccagaaattaatcctataaatttatggaaaacaagtaagggaatggaagttccgttgccgcatggatgcaggtgaaggaccttctcttttaacgttggatacgccaatgcacgccaacggaagactctgatattatctgtttggaaaggatataggatgtgcgttactttgtcgcatattcagaatcttaaaaagaattttagtatggaactgacaattattgaaacaagcgcgtattaggagttgagaaagctggtcagcacgctggtcgtacagatgggcgacttccagaaaaagattgccccgcctgcgccggacaagtgaatggatgcgcaggacgtatgtgatggacttatgcccaaacactttctgaagagtttccagcagcatccccttgagtatggccagaacggcaaatgcgtggcgtccgatgtgcggggtgacctcgccccggagttgcatttcctgcctatgattccaagactgagccgcatggcattgtattcacctaccggaaagacacattcggggagtctttcttttcatccgtacccctatatttttcaatcagttcgatagcaatgggcaataattttacgacatacgccactcccgtttttatacggttgcccatcagccatgtaccgccgtcggagtcggtatggatattatcgtatgttatggctttcaagtccacataggaaagaccggtgaagcacatgaacaggaacatgtcgcgcatggcacgctggcgtttgtatctcggttctatatggattatcctttgcagttcctcttcggaaaggaaagaacgcctcttgtattcgggcatacactcgaatgatgcgaacggatgaacccgtatccagcctttttcctgcgcgatatacatcagccacttcaaggtattgacacgcccgaagacagtggagtttgccaaagcgcatgtaccgagcatccagttgtagtaatcctcgatgaatgatttctcaagttcttcgatgacaatatcctctgcattcttcttgcttttcatgaaaagcaggagactcttgtaatcggcaaccagaccgcagtaggtgctttcggctttctctatgccgattttctttttatacggttccagctgttccctgaaaaggttcataagggtgtggcattcctctgagaagccgacatagcggttatagactttcttggctgtaacaaaactgtcgtggtcgcagatgtactggtagtgcctggtgatttgcgccttgatattgtcaagctcctgattgagtgtacgggcctcctcggacttgcctttggcccggttggttttgacgtcccacaaagcgagggacacttctttcttacaactgaaaccggcttgggttccattgatggtgatacggcccataatcggtgtctttccgttttttacagactgtttattctcaaaacacttagctatacatggtctgcgataagctaagagagattccccttacacaaaagcatggcatctccttgtcgtatctcgcctttatacttttatgtatagtagtctaccggatcgaatgaacaagacctatcccatacataaaccaatttagactgctatgttatttttgaggaagaagatggaatgagaccagataccctctttaaggctgactgtaagtcgattaaatgtagaaaaagattgcttttgtcacaagtaaagtgtatatttgcattgaaagaatcgttctttgacagaggcaaaagaaaacagaatattgtaattcgctcgtttctaaatcgttacctgatattaattaaacagaaataactgtttaattttcaattagatagagattgtatgatgtttcgctgtataggtcgtcaatggaatatttaaccctaaaaagctaccaatcttcttaagattcctattaactcctttagtaaccttacggattctatcatattgttgtatctccgttatatgaaatttcttatctaatattgggaatatataatcactaagagaataaccttcattcttatacttattaattatttcaatagtctgaggcaataatctaaatgtaataccttgcccagtcttatggcgtttaaaacatattctatcatctataatattagaataggttaaatacgccatatctatcatattaattccacacccaagataactaaacacaaacaaatctttactcaaatatagtaatgggctatagtaagtagtaatattacttaaatccagtgccaagactttagccatttccgacttgctgatagcacgtttagtcgtcttcttattaaaatgcgaaaccttaaacttcttaaacggataatatttctcatctacaatatcatcctctatcgctttattatagacagctcttagcgtcctaaaccgaatccccatagtattatcagaattacctcgttctcttaagaatcgttcataccgtttcaaccaagcaacatcaatatcagtaaaaggaatacacagatttacagcgaaggtcttcaatgaattatagcaatgcgtataagatttagcatttcctaaacgcttctcattaatcattaattctataatattccgtatatatgtatcaacatctgatttattctctttcttctcaactttacttatcaaagtttgaggagtgaaactcttacctaaagctcttaattcaaatatcaagtttaaatatttctgcttctcttgagatacaatctttaaaagccattcgtagttagggtggcttctcttaggttcctctttattataattccataaactatccagaacagacaaacccaaagatttataagccctctccttcccttgagttattcgtatcattaatggatattcaccattagataacttcttagatttaaaacaaacaatacttacagtagcatccatataagataattatttattatcaagatatggtttacactatggtttacaccaacagtaaattatcctcataaattattagtccaaactaacaatgcgcaagacataccaaacgctaagccattaattataaataagttatatagcgaagctggtagctttcaaaggcgtcagcctttggaagacgcagattcataatcatgaggtccccggttcaatcccgggtcccgctacttgataagaataaggcatttgggaggcttccacttctgggtgcctttttctttttatctcttcgcgaaatcattgtgaaatcttcaattacatttctaccagaagccaacgttgaacaataaaaatagcctcaacttacaaaaaattgaggctatcgaaatatcacttaaaaagtctctctattcccattctatagtcgcattaggtttcggagacatatcataacaaacgcgatttacattcttcacttctttcaggatacggtctgttatcttcatcaggataggccattctatcggttcgatagtagccgtcatagcatctaccgtgttgacagcgcgaataatcaccggccaatcaaaagaacgggcattatcacgtacaccaacagatttaaaatcgggtactactgtaaagtattgccatacctttttatccaatccggcaatctgaaactcttcacgcaaaatagcatcggactcacgtacagcctccaaacggtcacgcgttatagcacctaaacaacgtacgcccaaacctggaccagggaaaggttgacggtaaaccatctcataaggcaatcccaactccaagccacaagcacgaacttcatctttaaataattggcgcaacggctccacaagctcgaacttaaggtcttcaggcagcccacctacattatggtgagacttcaccattttagcagttttcgttccactttccacaatatccggataaatagtcccttgccccaagaagtcaataccattcagcttacgtgcttcttcttcgaacacacgaataaactcaccaccaataattttacgtttctgttccggatcttccacacctgccagtttattcaagaaacgatcggttacatctacataaataagatttgctttcaactggttgctgaatacctcaaccacatcttcagactctcccttacgcatcaaaccatgattaacatgtacgcaaaccagattgttaccaattgccttcagaagtaaagctgctaccacagagctatcaactccacccgacagagccaacaatactttcttatcgcccacctgacgcttaatcaactctatctgatcattgacaaagttcttcatgttccagttagcttcagctttacagacatcgaaaacaaatgatttcactgccgcctttatagcctcaatatcatccgcaaattctgccaacttcacttcacaagttgctttatcgtgacctgcagccatgacaggaatccccaaagtatagatagccggatttacatcaatggcaacgccatcaattacattattcggtccaccattaattataataccctttacattgggcaatgttttcagttcttccactgtgatatcgtgaggataaatctcactataaactcctaatgcacggatggcgcgagccaacaccgtattctcatgactacccaagtcaaggataacaatcatatcctgcttcatctgattttggttgtttttaagttattgtattgtttattattcactatcgtttccaaacggtctgcaaatataaagatttttagagagactataatacattgattctctaaagtttcagaacagagtcgcgtttttttgctgttatattattccaaagaaaaaaatgaagttatacagacaagcaaaaataaaaaaagaagcattcacaaacactatagagtttgaaaggcttcttttatcctagatattttatacatttgctgcataaaacataatatttcaccatgaacgaagagaaaagttcctttataaaaggtataaatgagcaacacccagccgcttatcatcagctttataatgaatattataaagcattggtgttgtatgccatcaactttctctcttcccaacaagctgccgaagatattgtacaggatctttttgcaactatgtgggaaaagaaaatgagattcttatcattgccttctttccgaacttatctttataattctatacgaaatgcctctcttaattatttaaaacatcagaatgtagaatctctctatcttgaacgcttggcaagcacttatcgagaaatcacagaagaagaagataccaatgaagaagaagtataccgactactatttcgtgctatcgataaattgccaacacgctgccgggaaatattcttattacatatggatggaaaaaagaatgaagaaatagctactgcactaggaatttcgattgaaacagtaaaaacacaaaagaaaagagctatacaatctatcaaagaacagatgggcacatgctattttttgctccccttatgtgacattttgtatagttccaagtttttttcgtaaccaaaataatcttttttagaaagtttgtacctctttttaatcttcatgttgtcttattaacaaatgataagacaataaatatatgaaaataaaatctggtacagaagaattaatagccaaatatctcttcggtgatattacagagcacgagaaaaaacaacttgacaattggatcaagacctctccacaacacgaagagtttttcaatcgtttacgaacaagcgcatcatttcgtaagcgctacgaggcatatacacagattaactcacatcaggcatggaaacatttcaaaaagaaatattgccaagtatcagtcacatcaattctcctgaaatatgcagctattttaatattacctataataatagcagcaggaggatggtacttttatattgcttccgaaaaacaaatatctgacaatctagccttaggagatgccatacagccaggaattcctaaagctacattaattttagccgggaatgacaagcaatcgcttaccccaacatatccaacaccagttaaagttaatcattccacaactgctatagctcaaaatggtgcgctcatctatccatcaacacccaatataaatatagatatacctcaaaaacagcagcctgaaacagtagaaaaaaacacattaacaactgaacaaggaaacgaattcagagtaacctttgaagatggaacaaccgtacacctcaattataatacagaaatacggtatcctgtaaggtttagtaagtctaaacgcatggtttatctaaaaggggaagcctattttaaaatagccaaagatgctcgtcctttctatgttatcactgaccaaggaacaatcaaacagtatggtacagagtttaatgttaatacattcagccctgaacgaacagaagtcgcattagtgaaagggagcattagtattattcctcaaggaagtacacaagaacaactcatagagccgggccaattggcacacattgaacagaaaggtaacaatatatctatatacaatgtagacctcactccctacatagcatggaatgaaggacgacttattttcgaaaatcgtactttagaaaatattgtcgaaattctagaacattggtataatgttaatatttcctttggcacttccgagcttaaacaactgcgatttactggtaatatggatcgttatgccacaatcagcccgatattaaaagcaatagcacgtactacgaatttacaaataaaaatagaaggaagagaaattttaatcacagacaattaattactaattaaacaagaagaaagaatgagaaagacaaaaagtagagaaagaatccgaatactttctctggtagtagtattattactattacccacaatgatgcttgccattccagaaagtggcaaaaaagtaactttaaatctggaatctgtcactgtcaaagattttttcgatgctttaagacaacaaaccggattaagctttgtctacaatacagaacagacaaagtcactgaaacccatcactatccatgtaaaagatgaaactgtggataacgtactacgtaccgtactcaatggcacgggtctcacttacagcatggaaagagatattgtcactatctctaaagtggaacaacaaggaagcaaacgtatcgcaacaggtatcgtttcggatgaagaaggatatcctttgcccggtgttaatgttgtgattagtgatcttcaacgctttgccataacagataataatggtaaatataatatagagattccagctaataccgcatgtactatcaccttttcatatatcggaatgtctactcagcaagtaatgattaatagtggtcggaatgatgtacgaaaaaatattactctaaaaagtgatactaaattagatgaagttatcgttactggaatttatactcgtaaagcagaaagttttactggagcagcaactactatttcgagcaaagatctgatgcgtgtcggaaatcagaatgtgttccagagtttgaaaaatctggatcctacaatatacattgcagataattttgatatgggctccaatcccaatagtgttccggatatgtcaatgcgtggaacttccagttttccaacgacagaaagcagttctttgcgcagcaactatcaaaatcaacccaatcaacctttattcattcttgatggttttgaaacaactgctgagacaataatggacatggacatgaaccgaattgaaagcattacaattttaaaagacgcctcagcaaaagctctctacggttctaaagcagccaatggtgtaattgttattgaaacaaaacgtttaaccggaaatcaacagcgtattacgtataatggtagtatttctttggaaatgccggatttaaccagttatgacctttgtaatgcatttgaaaaattggaagcagaacgtttagacggagtatatacaagtagtagcgccaatacacaaatccaattagatcaattatataatggacgacgaaaacttgcattagaaggattagatacctactggttatccaagccacttcacactggcataggacataaacataacctaaatatagaattaggcgattcccaaaatttacgtgcaatcttagaccttacttataatcagattactggggttatgaagggatctgaccgccgcaatatatcgggtgatataaatttatcatacagacataacaaactattactaaagaatatcctatcaatcatatctaacaaaagtaatgagtccccttatggagaatttagcgaatattccagaatgaatccatattggcaagcaactgatgaaaatgggaatatagttcaatgggtagaacaaattggctcaacatcaagcaaagtagctaaccctatgtataattctattatcggaaccagctttacttccagttatttacaattcaccaataatttttatgcagaatggcaagttgataaaaactggaaagcaacagcacgtataggagtctctgaaaaacgaaatgatatggatgatttctatcccgcctcacattccatttttgcaaatgttaatgatatacttaagcgtggtaagtatattatggaaaatggtaaatccagttctatttccggagacttgaatataaactataataatcaatttggtaaacatactatctttggaaatgccggtgcctttatctccggagaaaaatcatcagcatatcgacacacggcagaaggtttccccaataatcagaaggcagatatttcattcgcaaaacaatatgcagaaaacagtacccctactggttattccacaattaaccgtgaagccagcttcctattagccgcttcgtatgattatgacaatcgttatttagccgatgcaactgttcgggaaagcgcatcttccttatacggttcagataaccgttgggccaatagctggtcttttggtattggatggaacctgcacaatgaagccatcttgaaaggtgttggatggattaaacagttaaaacttcgggcctcgattggtttgactggaaatcaaaactttgataccaacgcagcaattgctacatataattattacacaggcgtcgtatatggaggcttagctggcaaatttacaggagcttatttagcatctatgcctaactccaaattaaaatgggaacagaaaaaggatcataatataggaattgatatgagagttgccggattatccctttctgttgactattactcagcagataccaagaatatgttaaccgatgtaacaatcccaacttctacagggttcgcaatagtaaaagataatttaggattggtacgtaattctggagttgaagctaaagctaattatacaatatggcaaggaaaagaaggttttgtaaatgtatatggaacatttgcctataaccgaaataaaataattcgtttgtcagagagtatgcgggcttacaatgaaaaaatgatgaaacaagcagaagataataatacctctgcacctgtattaatgtatcaagacggattatctatgaaaacaatatgggcagttccttcagccggtattgatccgcaaaccggacaagaaatatacattaaaaaagatggtacctacacctatacttattcagccaatgatatggtcgctgctggtaactccgatcctaagtatcgtggtacaggcggtttcacagccgagtataaaggtatcggattaagcgctactataagttatcttgctggttgtcaaatgtataattcaaccctcgtcagtcgggtagaaaatgcaaatattgcttacaatgtggatcgccgattgctaattggtcgttggactactcccggacaagtaacaccatacaagaaatttaattctgaaacaactacacgtgctaccactcgctttgtacaggatcggcgtgaattatcactctcttccatcagtgcatattatgagtttcccagttccatttataggaaattaagtatgcaacgtctgcgtttatcattctatttaaatgatattgcaacgttctcttctataaaaatagaacgaggtttaaattatcctttcgcaagaaatatgtcgttctcattaacagccactctctaaattttataaagatgaaaaaatacatattaatcctattaacgtccgtagtaacattatcctcttgcagcgactggttcgatgttacttcagggtctgaaattcgagaaaaagatcattatagcactctagccggattccaacaatctttaataggttgttatattagcatgacagacaatgccctttatggtaaagaattatcctggtatgcaattgaaatattaggtcatcaatttaatcctgtgacttccaattcaagtaatagtagagaaatgcaagaatatgaaaaattcaattacgaccacacacaaatattctcggacatcgaaaatatctgggctaaagcatattctgtaatagccaatgccaatgaagcattaactaatatggaaggacaggagtcaagtctgaacgaagtctattatcatgttatcaaaggagaacttcttgccattcgtgcatatatacattttgatctgttgcgcctatatggatatggtgattggaaaaaccgttccgcagaactaaactctaaaaaaacgattccatatgtaacaactttatcatcgatcccaactcctcaacgcacaggaaaagagacacttcaaatgattatcaacgatttggaagccgcagaaaaattattaaaggaatacgacccgatcacaaaaaaacatccggcttcttattacacaagtatagatgcagatggtttcttcaaagatagaactttacgactcaattattatgcagtcaaagcattggaagcacgtgtatatttatgggaaggcagtaaagaaagcatagacaaagctttaaatgctactgaagagataatcacagctatcggtgataatggaattgttatggacgatatgtacacttactcctacctgttaccagaaatttctcaatctaaccgttctctagcatccgaagctttatttagcctaaatgtttcagacgttacgtccaaaattacctcatatataatacccaacttcgtcaacacagactatacagctatgtatatatctccaacagatgttgaaaatatatatgaaggcataaattcagatgttcgtttcacacgaatgttagatcaaacccaaagtgattccagaggatatgtccctatgaaaattcatcaagcaagtttagacgaattcaataagaaccgcttgtctctaatacgcttgcctgaaatattctatattgctgcagaatgctatgcaacaagtgcaaccccaaatcttgacatggcattacaaaggctaaataagattcgcgaaaacagaggtatcagcacccctcttgaaaatctaaatgcagatcaaatcataaaagaaatacaaaaagaatatcacaaagaattcatttccgaaggtgtcatgttctattactataagcgaacagggtgtaaatctattcctaattatagtgaagagatgacagatacgcaatatttattgccttatcctaccttcgaaatacaatccggtcgtgtacaataaacaatattaatatgaaaaaaataattataaaatcagtcttagcgataagctgtttctctttatgcctcattagttgcggcaaggaagaaataccatattttgacagtcaatataatgctgtcagattcaattctacgaatgagtacgatgcagaaaccgacatatttaaagggaattattcttttctggagaatccctttgatgaatatggtgaatatgaattgcctttagttttggtcggaaatgtatcgacagaagaccgtactgtgaattatgtaatcaatgcggaggaaaccactgcccccgaaaacagttatgaaataactgctgcagtgattcccgcaaatagtttaaaaggaacaataaaaataaggctgtttaatactgatgaaatacaaaatggagcatcatataaactttatatccagctaaaggagtcatcaactctagggttaggccctaaagaatatatcacagcaacagtaagttggaacaacaatatcattgcccctccagcgactgaacgatatgtatggatgacatataattcactaataaaatcatccctagctccaacctcttattctacaacagcttatagttccaatgctttaaaaacaattgtaacagctttagactgggatgattgggacgatatgactgcgcatcctgaccaaccacagagaccaacatattttacatataaatatctcgccaattatagattattcgtaacagacaaatcatatgaagcttatgctgcaaaattagcggattatctaaaaaagtatcagaaagaacatcccgatacccccctagttcataacgaaggtaatttgaaaggacaaattatagaagccagaacatattaatttatataattctataaaattatgaagaaaaataatataactcaattaataatattactgctgcctaatattctctggtttacttcttgttatgaggataaaagttcatttgtaacaaaccttattccagaagtacaaattagtataaacgataaaaatcaagaaaattcaatatacgtaggttatcaatctcctgtcgatattgtaccatctattacccaagatggttttgatggttctaatttgcgctatgaatgggctgtaaccgaggaaccctcaactaataatcctgtttatgaaattattggtacagaaaaagactttcatggtattataaatcgtcctatatcaaatggagcctatacgttaaaattgactgtaacagatgtagcaaatgataacttacaatatatttattcttgggaattatatgtacaaagtagcttcctagacggattgttgatcgcagatagtgaaaacggaacaacaacagattttactttgattaacaattctcaaataacaaatcaatatacaaaagaagaaagaatattccgtcacatactagaaactgctaatggagcagcatatgatgaattattgacttcattaacctatgaggtgatggggaacacagcaatacttggtagttctcacttaaatcagatttgggctatttcttccacaggaaaaagcattcgtttcaactgtaaggactattcaataaacgggacatgggaagatgaaaaaatatttttatattgccccaccgattttcaagtaaaatcttatattcgttcttcacaacttttcatcgcttatacaaataatggactatattcattcttaaacgtagcaggtaacaaattctctatgcctaattctgtttttaatggatttgaaatcaataacaatgtatatgcagcaaattcttcatatagtattggagacaaccatttagtatggttagataaacccaaaggtgccttttattccttaaatggcacgagttataacacatgtactccgtatatctcaaatccggatttcgatcctaatgacatggggagtcaaacagctattgccgcaacaagttctcaagatggctcattggccactttcttacttaaagacgataatagtggaaattatgctatttacactttaagccaatataaagcagaagaaggctactatgaagatcctgataattgggagggatggattgtgacttcaccagaacaaccagcagcagcaaaaaacaaatatattattccaacgacaggaaaaaccttactagacaaagctgtatctattttcttcggacatacaaataatgtattatatgtagtaacagatgcagctatatactcatttacttacggtatgggaaatgaagtatctgtctccaccacctcacagtttacccccagtaacggagaaaaaattacaaaggccaagttatatcaacaagggcaatataccaatcaaattaatgtaatgactggtaatccaccaactattgccccaaatgcatggaataacaaagccctcattattgtgacccaatccgcagaatttaacggaaaagtctcaattgttccgatgaaacaggccggtgcaggaaccttggatatttctaaagccctaatctatgatggttttggtaaaatcctagatgtaacaacaaccggatattaatctaatttcataaaaatacattaaagaactgatatgaaaaagaaaatcctcttacttgcagcaatggtggtagcttcgtctaccaccattgacgcacagcgtaaatttccattcttctggaaaaaaaagaaggcaaaaacagaacaaacaactcctgctaaaaaagaaagtgaatatgacaaactattcaagaaaaagcatgaaatagccaaaggactgattactctccatctgctggatggaaaagtatattttgaacttcctgtgaatttaatcaataaagatatgcttattggttccactgtcaccagtatctctgataatggcaatgcagtagtcggttctaaaccgaccgatcttcttcacgtagtattcacacgcaataaaacacatgtacagttacgtcaggtaaacactgactatattactggtaacacacaaattgatgaagctttacgcaaaagtacactgggagcaattttaagcaaccaaaagattcaagcatacaataatgactctactgctatcgtttttgatatgagcagcgtcttcctgggcgacaacaaaaaaatgagtccattcgatcgtaattcaatctatggaatgtacaatcgtacagagaattatcaatccgactgctcttacatttcacaaatcaaggctttcaaagataatgtttctattaaaagctgtctgtcatatacattctctgtcagcaattcacaaggggcgtcactcataaaagaccgtccattcaccgcagaaatgacacgttctatcatgctgttgaaagaaaagccttaccgtccacgtatggcagattaccggatcggtgtattctttaccggacgcgaacaactaggcgaaggagctaaaacaaccgcacctgtttactatgccaatcgatgggatatacaaccgtctgacactgctgcctacctacgtggtgagaaagtgaaacccactaaacagattgttttctacatcgataacacttttccggaaaaatggaaaccatatctgcgggaaggagtcacccaatggaatgaattattcgagcagattggattcaaagatgttgtagcagccaaagatttcccgactgatgatccggaattcgatccggacaatatcaaatattcatgtgttcgctatgctccatcaagcattgagaatgctatgggaccatcatgggtagacccacgaagcggagaaatcttgaatgcctccgtatatttatatcataatgttatcaagcttatcagtaactggttgttcgtgcaaacagcacaagccgataaggatgtacgcactgtcaatattccggatgaaatggttggagacgcattacgctatgtactttcacacgaaatcggtcactgtttagggtttatgcataatatgggagcttcttccactttcccggtagattctttacgttcaccggaattcacgcagaagtatggcactactccttccattatggattatgcccgcttcaactatgtagcacaacctggcgataaagaacgtggcgttaaattgactccaccccgctttggtgaatacgacaaatacctcataaaatggacgtatactccggtattcaatgttaattctgcagaggaagaagcaattataacaggcaaatggatcactgatgccattaaagaaaatccagtgtaccgatatggaaaacaacaagtatatggagttgttgatccccgttcacaaacggaagatattggtgacaactctatgaaagcaactcgatatggcatcaagaaccttaagtatatcatgaataatttggaaagttggatttccgaaggtgacgatacatacgaataccgtgaagatttatttattggtatcgtagaacaacttgcaatgtatgttacccatgtagcaggcaatgtaggtggctattttgtcaacgaagttaaagaaggggacacaatgccacgttttgcacaaattccgaaggcacaacaaaaagaagccctgaattacctattcgaaatttataatgatctggattggcttgacaacaaaaacttattaactaaatttccggtttccggttcccctaaacaaactattcaaaacttcatgttgagatatatactgcctgtaccttttcaggtatcacaatacgaaggattagagaaagattcatttactgctgccgaggctttcaacatgatatacaattttgtatggaaaccgaccatttccggacgtacattaacagaatcccaaatgaatctccagaaacaatatatatacatgatgatgcaaactgccggtttcacaattaaaggagccgggaaagcattgaccggagaaaaaccacttgacatcaatcaccgccagttcggatatacttgttgccagggacatgctatcaaagaggatgttatacacaaccctgtagcaggttttgaatggagaccgttgaatcgtttttctatgacagccaaagttacccaggcagatgtatacgcatatatagctaaagccaaacaactgatgaaacaaaaggcagccagtgcatcagggaagacgaaagctcactatgaattattattaaagatgctcgacatcaacttaaaataagggagggacaaaagatgaaaatactatttttatggttgatggcaattttgttgattatcggatcaacaaatgaagccaatgcccgctccaaaaagaaaaaaggaaaagcaaaaaccgaacaacagactgacagtgttcaaaagaaaaaaaagagtgtctacgacaagcttttcaaagataagaagaaacatacagtcaataaagggacaatcacagttcatcagtacgaggataagatttatctggaactaccggttgaattaatgggacgggattttttagtaaactctgccatcactactgcaagtgacatttcactggcaggcacaaaagctgctcaaagtaggtatctgattattgataaaaccgattcattaatattattccgagatccgaaatacaatgttcgcctcaacgaacaggacgataatcaagaagcggcttttgcattatctcgtagtaatgctatttacaaagcatttccaattgaaggatacaccagcgattcaacggctgttgtatttaatgccacttcctatttctcttgttccaataaagatgtactcaatcttagcggacgcagttatggaggtatgctcacaattgtaagtgcttcccctcaaagtaaaacatcttttgtggactctgcagatgcattcgacaattgtatcagtatcactcaaaactgtactgcaaagttgagcatcagcatcatgggattcgtctccaaagaacaaccggaattaaccatgtcggtacaaacgacactagccctactgtcaaaagaaaagatgaatacccgcgaagccaacccacgtgtaggaacaggttatatcgcatacacggactatcgtaatgaaaaacgtttcaagaaaggatattatgtaacacggcgtaatataacgacgcaacaacctgttgttttctacatcgacactctgattcaagatagctgggtaaaagccatccaaaaaagtgcagatgaatggaatataatatttgaagacttaggaataggaaaaccaatcataataaaaccgtatgagaaaggttcaactttccgtgctaataacccaatgataaatacgattgctttcctgaataacaacaactcggaagttactgcgtacaatgtcactgatttacgcactggagaaatcttaagtaccaagataggagtaccacgcgaccttgccgtcagcgtacgtcgcaatggagtataccaaatggcagagattgatccgcgcttccggacttattacattgccgatgaggtgatctgtgagaatctgacagcacgtatgctaaaagcatttggtcttagtttgggattggcaactaatttggctggttctgcagcatactccccagaggaactgcgttctcctgaatttactcaaaaatatggtatcacagcttcagtcatggacaacgtattatacaattatctggcacagcccggtgataaagaaaaaggagtggtattgattgtcgacaaaccgggtgtatgtgatgcatttacgctcaaatatctgtatgccgccaccagtgaaaatgaatcagacatgttgaagaaatgggctatggaacacgatggagatccacgctatttctatggaaagcgttcaccagcttatgctacagacccgcgttgccaaaactatgatttaggtaatgatccgatagcctctttagatgcacaaatcgctcatgtgaaatatgtagttaaaaatagtcctgcctggtttcacgacgataatatccccaatgattaccgggagctatttcctgattttgtgattattgaattaatcaataaaacattgtcacctgtatcttcttatatcggaggtatttatatcaatgaagccaacgaaaaaagcaatgttccttcatatcaaccggtatcggcagatatgcaaaagaaagtcttacaaaagatattcagtaccttctatgatttaagttggctggactctaataaggatttcttgcgtttaggtggtgtcaatcctgatatgtcagcatggatttacaataacgggtatccaatgatgtctttgatgtttcgtttgatgcgtatgggattgagtgtagagaaatcaactagaccttatacccaagaagcatatttgaatgatatagagaaacaattattcaaagaaactttaaatgggaaacctttaagtgctccaatgattgcacaactgtctgtatatatcagttctttaaaaggaatgtgtccgacattaaaggctattgacaaggctgtatcaacaagaataacttccattgctctcaacgagcaaactaatcataagttacaatcattagggttgctgacaacttttgcctctatatctgcaacagaagagcaatcgggtatggaacctatgactgctgtcaatttctatgtcggtacggatatcgaagccatttgctatgataagttgaaaagtacacgtcgctatttgatacaagctcgttctttggctagtaatgatattgaacgtggaaaatgcgattatttgatagcgatgattgacagggtaatttagcctttcctctaccattcaacgtgtatgtttataaaaagtttagtgatagtaaaatgtataacaataaaaaaaaattatattatgaagcagattattttattcattgtattcatatttactataatgatgtgttcttttgcacaagaagccccctcctctccaataatcaaggcaagagacaataaaagtactgagtttttcaaaaacaaaaaacttcaatctccgatctccccaatggtccttttcagtcagaaaatcacaggggttgtttatactgaaggaggaaaagaggtactaataggcgcgagcgttatcgaagtgggtagtactaatggtactataactgatattgatggagaatatagtataggcatttctaaggccgacaaaaaaattctccaagcaagttatctgggttatgaaacaaaacaagaaagaattggaggccgtagggtggtgaacttcttcctaaaagaaagttcacaagccttagacaaataaaaccacacactatcactaaactttttataaaacagcaatatgaaaaaatttatttctatttttttattgttatacattactttaccgataaatgctcaagataaaacaaatgagctatcgggatttattatacacaaacaagaaaatgggtctaatggttcattagacggtgccaatatctttttgatctatgcaaaagacacactgaaaacaacaagcataaatggagtattccgtttcaaacccataaaaacaggaaaagcaaaactcattatcactgcaatagggtgtcggaaagttgaaaaagaattaaatataatagctggaaagaattctaatctttacatagaaattttggatgaatccatccaactggaggaagtcaccatcaagggcagaatccccattgtgacccaaaatggcgacacgctaatattcaacccgaaggcagtcaacatacaagaaggggatgtcgctatgaatatagtcgagcaacttcccggaacagagactgacgaccattccgtcaaaatcatgggaaaacaagtaaccaaaacttatatagacggcagactaatattcggaagtgacccaatggcagcactaaagaatctttctgcaacagatgtattaaaaatcaaggcttatgatgaatatgaaaatacgaaaacaaaaaaactaatgtacagaggggatctcaccagagtgctcaacatagaaaccaaaagcaaactcatcagctcatggaaagcacacctattggctagtacaggcagcaacatggactcaaagaacgacagaggaaagttccgtaaagggctcggactcaccactaactttttctccgagaaatttttactcacaagtaatgtatttcacaataatatcaaccgaaaatcaaataatatcaaaaatgttctttccatttccgatcctggtagtacttacaacgaaacgacttatgcagatctggctacggaacgctcatgggacacagaaaatggaacatacggtacatttagagcattttacactttcggatataatcgcgataatacaaatacacgatccgaacaacattattttcctggcaacaattatcagcagcgcctttatgaagaacaaaatagcaacagtgacagaaaacaaaatcactattccgaattttctttctccaattcaaatgacaaatggggagaattccgttggaaccagcttataacatataacaacaacaaagattggcaatcgctttacatctataatgaagaaaacaatcttcaaacatcgaaaagcctgatgcattacgataatctaaacaagaattttcatgtgaaggaagatgtcagttatgtcaacagtattaccgacagaatcggatatacattagaaagttcagtagatataaataaaggcaaaaatcattcattacggatagacacattagaaagttcgacaacacaaacttatctgactattccatcaaaactccgcaatacggagtggaacggcaatgcgcaattaatatatatactgaatccagaaaatgacacccaaatatcttttgactattccgttaaatacgaaaacggatggaaacaccaattcgcctggaatatgttgagccccacaaatccacaaacagacgaagccaatacatatagttataaaataaataacctgacacaaaaacaggaagtttcatttcacttttttccctttcaaaaaacaagttgtgacatttcagccggactgaaggaaactacacttaagcggaaagaaaaagaaatggacaactaccgtaaaacattcatctctccaacagtagcaatatcttttgtgcatacagatataacaaagtcatggagtgccgcttacagactgcataattttgcaccaaacatagtgcagttacgcccacaaatagataacagcaatccttacatgctgcgcagtggaaatcccaacttaaaacaatcatatctacattcgttcctcttcaattgcaatcgtatgttaggaaaacataaccacaccataggtgttattatcaatgcctctatccgccaacactctcctgttgcaaagacaacctattacaatgccgaaacttatctatcgggattgcaatacacagcacctgcacacagttctctaattagttttgaaaacgtagaaggatattgggacataaaaggcaaactgatatggcaggctcctatacgtagtataaaatccaaatatgccttatctaccggattcaactacgaacataacccatattatataggagaaaataagactacaacacgtacctatgatccatcgctcgaacattttctactctgtaatctaactaaaagattaaaaataacaatcagtgccaatactcattatgtacatagcatcaatactgaaaattatacaagtaaaacattctatcaaacggcaggagcaacatttgatataagccaaatatgtaaatacttctatctaagtagtcattataatttcattttcagccgtgattatggaatcaataaagagattaaccgcaatcacaccctaaacttgaacataggctgtaaagtgttaaatcgcaaaggagacattagtattgccgcatatgatctactaaatagtcatcggactttcaacagccaaatgtattccaactacattcaaaacacgtggacaaattattatggacggtttttcaccataaattttgcttatcggtttggtaaagtgaaatcgaactacgaaggtactacaaacgatggaagcatacgcgaatataggccgatgtcagataaaatgtgaatttcatagctatccaaatgaaagataactataccagttatattgaccgagaaaacttcgggcggtattttaccataaatttctcctggaaattcagaaagatcaaatcgaaccggatggatatttcaagaggagttacatggtaatatgaataagaaatctattaatcatttaaaataaaaagtatgagtaatcctattgtcgaagttaaacacttatctcatcgttatagtgtagattgggccattcgcgatatcaatttttctattgaaaaaacaggaatattaggtctgttagggtctaatggggcaggtaagtccaccactatgaatatcatctgtggagttttaaatcaaacggaaggagatgtatttatcaatggcatcgatctacgaaaaaatccagttgaagcaaaaaaacatattggtttcttacctcaaaaaccacctctccatccggacttgactgtcgacgaatatctcatacactgtgccacactgcggagaatggagaaatcaaaaattcgtgaagctgtagaaatagctaaagaacgttgcgctattgcccattttagcaaacgacttataaagaatctttcaggcgggtatcaacaaagagtaggaattgcacaggctattgtacataatcctccattcgtagtacttgatgaacctacaaacgggcttgatcctaaccaaattgtcgaaatacgcaatctgattaaagaaattgctgaagatcattctgtcctactctccactcatatcctgtcggaagtgcaagctacctgcaatgatattcgcatgattgaacatggtaaagtcgtattttcaggtagcatgaaagactttgataactatgtggttccaagtagtttcaccgttacatttgcccttcccccttctatagaagaactagcaaagatagaacatgtgttgaatatagaagaactctatcccggtacattccggatacgctttgatgacgatgaaaacataactgaacgagtagtagccttaagcatacaaaacggatggcgactgaaagaaatcacgatggaacgctgctctcttgacataatctttgcacaactatcgggaaaacttaaaaataatatctaacatgacggatttaaagattataatgcgtattgcccgaaccgatctggctattttattctattcgccgattgcatggttcatattgattgttttctcattcctgacaacagcaagttttacgtcattgatggagaatatagtgaccgactatgatctgtcaggcggcaaggaagtatctttgagcggtatctgcttcttaggtagttacggctttttgtcctccgtcgtatcaaacatatacatctatattccattgttgacaatgggactcatcagtcgcgaaacggcatcgggttcaatcaaactggcatattcatccccagtcaccagtggtcagatcgtattaggtaaatatcttgcagccatcggatttggttgctgtctgatgcttgtcccgatagccagtgctatttatggcagtttggtaatcccttcttttgattgggctcctgtactagtcgcccttctaggactctatttattaatatgcgcctattgcgctatcgggctctttatgtcctcactcacgacttatcaagtagtagcagcagttgggactcttattatattagctatactgaatttcgtaggaagtatcggccaggaatacgatcttatacgcgaactgacttattggctgtcaataaacggaagaacaatcgatatgctgaatggagtaatccggagtgaagatgtgatttatttcgtggtcgtagtaacccttttcctgacatttaccactttcaaacttacatccgaccggtgcactatcagtcgtttccggcaagcaatcagctatctgggattttttgtcgcagcaatggcaattggctatttcacttcacgtccgggaatgattaaggtatgggatacaacacgcactagactaaactcacttaccgaaaatagccaacacgtattagcaaaattgacaggaccggtaactattaccaattatgttaacctacttgataacaaatcatatcgctacctccctatcatgaagaaagcgaatgaaacaatcttcgaaccttattgtctcgctaaaccggacctgcaagtgaaatatgtctattattatgatttcgcccccaacggcgttgcaaataatcctaagtttcaaggcaaaacagtagatgagatgcgtgattatatgaccatgatttataacttgaatcctcatttattcaaatccccggcagaaatccgccaaatcatcgacctgcgtgaagaacaaaatacatttgttcgcattatggaaacgcaagatggaaaacgtaccttcatccgtgattttgaagatatggatgcaacgccatccgaagcggaaattacagcagccatcaaaaagatgatttcaactcctcccactgttgcctttatcaaaggagacggtgaacgtgaggtgtccaaatccggtgaccgcgattatagcaacttctccattgagaaatattctagagccgccttaattaatcaaggctttgatgtctgcgagatcgacatttctcacggagacaccattccttccctaatcaatattatggttcttgcagaaatgagaactccgcttactgaaaaaggagaaaatcaactggaggcttacctggctcgtggaggtaatttatttattctcaccgatacaggcaggcaagaagttatgaatccttttttaagcaaactcggtatcaaaatggaagaataccaactggcacaatcttccgctgatttctctcctaatctgattctagccaaggcaacccgtgaatcgggaaaacttacattcggattcaaagatgattttcccaaatatgatttacgtgtctctatgcccggatgtgtagcccttacatgctccgacaacgattacggcttccaatatactccgattcttgaaacaaatgccaaaggtgtatggattgaaaaagaacaaacagatttacaggaatcaccagtagaatgtaatgcttcggcaggagagaaagaacaaacctatatcacagcctatgccctttcacgccaactgaaagataaagagcagcgtattatcatctctggtgatgcggattgcataagcaacaccgaactgactctttcacgcgaaggatatagatcaggaaactttaatctgattatcgaaagcttccgctggctttccggaggagaatttccaatcgacatacgccgtccccattgtaccgacaacaaactttcgatcggagtgaaagatattggtacaatgaaaactattttcataatcattataccagctatcctcttacttataggagttggcatctggtttttccgcagaagaaattaataagagaaaaagatgaacttaagacttatacttagaatagcccgtaccgaactagcggtactcttttactcaccgatcgcatggttgctgctggtcgcatttacatgccaggtaggattcgactttatgaatatcctgacggaaatagtaaaaataaaagcattgggcaacacgatcacttttagcgtcacagccggttttgtccttggtctcaaaggaatatatgaagtaatacaagaaaccatttatctgtatattcctttattaaccatgaatttgatgagtcgtgaatattcatcaggctctatcaaactactttattcatcaccggtaagcagtgttcaaatcattaccggcaagtttgtttcaatggtggtatttgccctaatctttgtcatcatccttgccctaccgacaatcgtaatgtttatctccgtgccgcatgtcgatattacacttatcttggcgggattgttatccatgtttctgttgatactgacctattgttctatcggtctctttatgaccacactcacatcttaccaggttgtggcagctgttgccaccctttccgcattagcatttctcaattatgtgggaggaattggacaggagtccatattctttagagaaattacttattggctatccattaaaggacgtgccagtgagatggttggaggattgatatgtagcgatgacgttatctatttccttgccgtaattttattattcctctggctatcggtcattaaactgaataatgaaaaaacacgtcgctcactcttttcaaaaacaatgcgctatgccttagctgtatgtaccattatagttatcggctttgtcagttcccgtccggcaatgatgggcttttatgatgctacccgcagcaaacaacgtacactttcagaagaaagccagaaagtaatggagcaattgtccggacctatgacgatcacaacttacgtcaatattttcgataaagaatttgatgtcgcttctccaagagagcaaaaagaggatatggcacgcttcaaaatgtacacacgtttcaaaccagagataaaaatggagtatgtttactattactctacaccgaaagacagcaccctttatcgccaatatccgaataaaaacattcgtgagatagcttatgaagttgccaagaagaagaacttcaatcctaaaaagcttaaaagcgccgaagaactgaaagaaaaaatagacttggctaaagaaaattatcgatttgtgcgggttgttgaacgtggctccggtgaacaagcccgccttcgtttgttcgacgatatggaatatcacccttctgaaacagaaatctccgcagcattgaagaaaatgcttgttactcctgtgaaggtaggcgccatcacaggacatcaggaacgttccaccactaaaaagggagatcaggattactcacttttcgccacacatggacgctttcgttattccatgattaatcaaggttttgatttggtggaactgaatctaaaggatatgaatgatataccaagtaatatcaatatattacttattgctgaaatgcgttcttccatgagttccaaagaacaagaaatcatagaccgttttcttgaacgcggaggtaatatgatgattatgggggacgtcggacgtcaggaagtaatgaatcctttactccggaaagttggtttaaaactgttgccgggaatcattgcacaaccttctgatattaatcccggagacctcgttctcgcgaaagctacccagatagccgccgacagtataggaggcttctacaaacgtatggttgacaggcagacgcatagcgcagtcaccatgccatcggctgttgctctggaagttgtcgatacaacaaaattccatccaatagttttattacaaagcaacgctcaacaaacatggattgagtatcaaacaaaagattttgtgaatgattccctttctttggactctcttcaaggtgaaaagctaggagcctatcccacggcaatagcgttaacccgcaagataaaaggcaaagataaaaaacaacggatcattgtgttgggtgatgcagactgtttcagcaatgccgaactacaaaaaagctcaagaccgggtatctattcattcaacttcaatatgattcccggttcattccgttggctatgctataatgaatttccggtatcttcttccagagccccttatctcgacaaagatatcagcctgactcctatggatctatccactatcaaaattatctattgctatggcatcccatttattattggtctgtgtggtatttggatatgctggaggagaagaaaacgataaaaagagagaacagagaaacttccggcaagcagatttcatgcctgtcggaagtctaattctttcatagactccttcaaaactacgccttcaaccgcatcacaaaccgactccccttacccaattcgctctctaccgtcagcgtaccgccatgagcttccacaaaatccttggaaatagataaccccaagccactgccttgcactttcgttccgggtacacggaaatagcggtcaaagatacttttgtggtaacgcgggtcaatacctttgccaaagtcttggacatacaattcaatccagttttcatcctgtttagcaccaataaccacatgcccgttttcttttgaataacgaatagcgttacttaacagattcgtcaatacccaagcaatcttctcgctgtcaacaaacagtttaccgattttctcctccggatactccacttctatctgaatattaaacttatccgcttgcacctgattagctttgatcgcatactcaatcaattcaatcggtttggtgatcttcggcatcaactgtaatttaccagcttccacctgcgtcatgttaagcaattctccggtgatacttaacaaacgttcgctattctccttgatactctttgaaagctgttcctgctcatcattcagtgcaccgacacgcttatcctcaagcagttgtagactcatcataatagcagcaatcggagttttcaattcatgagagatcgttgaaataaatgtagtcttggcagaatccagttctttgaattccgtgatattcttaagtaaaatgacatcacccagtttgcgaggttcccctttttcagcctccgtattaatgatcgggacataagagaccttaaaataactttccttattatccgcataaatttttaaagcctctttctgatcgcttggcgtcaccaactcacgaattagtcgacggagcaggtcattcttcaaagaaagttcctctgccgatttacgaatcacattctcccgtttcatattcagaatacttaaggcttcatcattgataaacaaaacctcacgttctgtattcagaccgataatcgggtcgttaatactgttaacaatagcttctataaactttttagcagaaagaatatccgacaaagtactggcacgatattcagtcaaacgctccgccatccggttgaaactgtcagccacttcacggaactcttcattgtcactcatgtcgagacgcttctcatagttatgattggctatttcaagaattccttctttcagttccttaatcggcttgctgatagaacgaggtaaccaataaagcaatatcagtccggtcaagatacagattccccctgttatggagatccatagcaatgcacgttccaaggcaggcatagcagcaggactatcaggctctgtcgcagtcagagtttgaagattcactactgaaagtgttaccaacaaaataatcattcctgccaacatcccaatgccaagaatcagtttcgttttaatattcataacgttcatacgattaatattatgcaagtataatcaaatctacattagcttgcgacaaattatttaaaaactttctatatcccagtatagaacaaattgcgtacggcaacctcaaattaggagttcccatacacactgtcgatatctgtttctctttacaaaccttgacgatgctccccaaaatgtctttcgactgcacctggacaacttctcccccaagttccgccaccagtttaaaatgattcaacaaataccgttgactggccaaatcaattcgatccatactctctctcggagtctgaacatacaaagctataaaagtagtattataccgggttgccaactttgccgcctttctgataattcgccggggtgttttctcgtgactactgatacaagccataaacttctcatgccgaagtccgacggctactcccatcatcacttcattctccacctttttttctacccgcaacgccacttccttcagagccaactcacgcaattgaagaatattctcggttctaaagaaattatccaatgctgtctgaatcttttccggacgatagatctttcccgctttcaaacgggcaatcagttcttctgccgtcaagtcaatattcaccacctcatccgcttcctgaagcacactgtcgggcactcgttctttcacttcaatccccgtaatctcctgcacttcttcattcacgctttcgatgtgctgaatattgattgccgaaatcacattgattccttcatccaacaatgtcattacatcttgccaacgtttctcattcagacttccttccacattggtatgtgccaattcatccactatcacaatttcgggatgaaggcgaataatagaatctaaatccatttcttccaattcctttcccttatagaagattttacgtcgcggaatgacaggaagtccttgtagcatcccttccgtcccgacacgtccatgagtctcgatatagccgattttcacgtccacaccattttccaacagttcatgtgcctcctgaagcatacgatatgactttcccacaccggctatcataccgatatagaccttaaacttacctcgctgagatctctttatcagatccagaaaatgctgtacactttgttctctatcatccattatgttgctctgttattttaaacatcctaacccgtagcaatcatcacgatcaccacgggttcacaaaaattcatgagtttattttatggccttaaagttacgccaaatactagatgggcatcctccaaacgcggattccatatagcttgcacaaatataggcaatgaaaacttatcattaaaattgatagctttcgttgctttcaaagcaaggttcgtcactgcaaaaccattcacattatactgcggagtttcataaggaaccactccacaggtagcattcaagtctaccccttttacgctgaacggataattcagttctacgtaagaagaatatgcctgttcttcttcccccttgtcagtcatctttctgtcggcaccggcaaacatggtataccatgcaatagacaacgggaatttttcaacaggaagcgtataagctaatcctgcttcaaaatgatgtccggtgtcgccactcttaaaatggaaataatcatttgttagttctccattggctacatcagcttgtccgttccaccaaagactggctactgaaagtgtcggtcctgcttcaccaaacttataagctgcagtgaggtcaatttctttattactctcactcaaactggttgagccccatgcagtaagtgagaaattacctacgctaactcccaaagtcggttgaaaagaagcggccccccccctgataaataccacgccatacatacgaacttaccaaatcaccttgtatagtaaactcttgtgcttgtgcattgccagttcccaacatacatacggccgctacagccattgttcctaaaatactctttttactaaaaaaacttttcatacttcttatctaattctattttatgttcctgtaaaaaagcagcgccccatcccccccctgtttatttgaaccgctggtatcacccaaacgattcggacaggaacgctgctcctgatcttcatctacttattactttcttcaagagctatattcaatttcagcacattcaccttttctgttcccaacaatcccaggaacggtttttcgatgcttttatcaacaatcgctcttacttgttcttctgttaatccgcgtgcttgtgccactctcttcacttgtacgtatgcacattggggagtaatatcaggatccagccccgaagcactggctgtaaccatttcggcaggtacatccgcacggtctaaataaggatgatgtacaaggaaagtatcaatacgcgctttcacttcatccagatattcctgattcgtaggacctttattactacctgcagaactcgtagcatcatatccgtcaccggcagaagacggacgtccccagaaataaatatcttttgtaaacatctggcccacattagctgctcccactactttcccatccagcgtagctacctcggcatttcccttattaggacctgcaacctgcgcaaacaaccacaagataaggatatagaacacggagaaaaagacacaaaaagcaagtgttatttttaatgacttcaataaagttttcattgctattgttttttaattaaaagaataaacctaccaataaatctatcaacttgattcccacaaaaggaacaatcacaccacccaaaccatagatcaacagattacggcgaagtaaagcactcgcacctatcggtttgtattgcacgccacgcaaagccagcggaatcagaatcggaataataatcgcattaaaaatgaccgctgaaagaatggcgctttcaggactatgcagatgcatgatattcagagctgccaattcgggaatagcgaccataaacaaggcaggaacaattgcgaaatattttgcaacgtcattggcgatagagaaagtggtcagcgtgccgcgtgtcatcagcaattgtttaccgatttccacaatctcgatcagttttgtcggatcgttatccagatcgaccatattaccggcttccttcgcagcctgtgtaccactattcatggctacacctacattggcttgtgccagagcaggagcatcgttcgttccgtctcccatcattgcaaccaatttaccagcctgctgttccttcttgatatattccatcttatcttccggtttagcttcagcgataaaatcatccacaccggctttttcggcaatatattttgcagttaacgggttatctcctgtcaccatgaccgtcttcactcccatcttacgcagacgttcgaaacgttcctgaatacccggtttgataatatcctgcaactcaatgacaccggtcactttcttgtttacacatactaccaatggcgtaccaccattgctggagatagaagagataatctcttccacttcttttgggaattcatttcctgcaccttccaccatcttacggatagcgtcgaaagcacctttacgaatttgcgttccatctgccaggtctactcccgaacatttggtttcagccgtaaatttaatcatacgcgctcctgttgtattcaggttacgcatacgcattcccgactcgcgtcccagttctacgatagatttaccttccggcgtttcatcggacaaggaagacaacagacaagtctctacaaaatcgtgcaaattgacacccggagccgtatggaaatgagttgctttacggttaccgatggtgatagtacctgttttatccagcaacaacgtatcaatatcaccggcagtctctaccgctttaccagatttagtaatcacgttggcacggagcgcgcggtccataccggcaataccgatagcagaaagaagtccaccgatagttgtcggaatcagacacacaaacaaagaaataagcgaagcaatagtgatgaccgtattactatagtcggcaaacggtttcaaggtaacacacacaatgacaaaaacaagcgtaaaacctgccaacagaatagtcaacgcaatctcgttcggggttttctgacgggaagcaccttccaccaatgcaatcatcttatcaaggaaactttctcccggttgagtagtcaccagtacttttatatgatcggacaataccttcgtgccacccgttacggaactcttgtcgccacctgcctcacgaatgaccggagcagactcgccggtgatagcactttcatcaatagaagccaaaccttcaataatctcaccgtcggaaggaatcacgtctcccgcctcacaaacaaacacatctcctttcttcaattgtgaagaactgacggtaacgattttattaccttccactttctttgccggtgtctcttcacgagtcttacgcaagctgtcggcctgtgctttaccacgtgcttcggcaatagcttcggcaaaattggcaaacaacaaggttacaaacagaatgataaacacggcaatgttgtaagcaaacgaaccttgtgaagaatttacaatggagtagagcgttacgagtagcatgaccactgtagccacttctactgtaaacataatcgggttctttatcatcatccgcgggttcagtttcacgaatgactgtttcaaactttctataacttgctcctttggaaacaaagaagctgatttattatctttcatatcttctctaattcagtattacaaacttaaatgttcagcaattgtactcaatgcatgtaccgggaagaacgacagcgcagcaataatgaagataaccacaaatgtcatgactccgaaagtcaatgtatcggtcttcaatgtgccggcactttccggaatgaatttcttctgtgccagtaatccggcaatggcaacctgcccgatgataggaataaaacggctcaaaatcagaacaataccacacgtataattccagaaataagtattatctcccaagccttcaaaaccggaaccgttattggcggcacaagaagtgtactcataaagttgctcacttaaaccgtggaatcccaagttgttcaaccatccaccttcactttccacaaaatcagggtggtgcacataaatataacttgagagtgctgtaaataccaaaatgacaaacggatgaagcagagctacaatcgtagcgattttcatttcgcgggcttccactttcttgccgagaaattccggcgtacgtcctaccatcaaaccgctgataaacactgtaatgataataaatgtatagtaattcatccatcctacacctacaccgccaaaccaagtgttaatctgcatattcagcatctccatcattccggacagcggcatagtagaatcatgcataccattcacagaaccattagaggttacagtagttacaatactccataatgctgttgctccggctcccaaacgaacctctttaccttccatcgcaccattatcctgcgcaattcccaattcatcaatgcgtggattaccacccatttcctgactgacattaatacatacgcctaccagaaaagcgaaaagcattactccgaatatactgtaagccaacttctttctgcgggtataaaatcccagcgcaagtaccattgccatcgggataatcaggatagaccaacattctaccatattagtaagatatgtcggattctccaacggatgagaagagtttacaccaaaataaccaccaccatttgtacccaattgtttgataggaacaatcgcagccgtagaaccttgagaaaccatttgttcctggccttccatcgtagttaccttcatcttaccgtcaaatcccatcggagttccctggagaatcaggataaaacctacaaacagagaaagaggcaataaaatacgtgtacagcttattactagaaattgccagaagttaccaatcgttttggttgtttttgcagcaatactcttcataatacctgccatagcagccatacctgttgctgcggtaataaactggaaaagcatgatgacgaacagttgagtaaaataagtcaatccgctttcaccgctatagtgctgcaagttacagttcaccataaaactgatacaggtattgaatgcctgatccggagtctgcggtccgttgccgtccggatttaagggcaaccatccttgtgaaaccaagagtaccattccccagaaaaaccagaaagcattcaaaatcaacaatgctttcaggaattgtttccagttcatttcttcattggggtcgattccacaaactttataaatgactctttcgataggagccataaaatcagaccaggtcttttctcctctgtagaccttggcaatgtattttcccagtggataagccagaatcaccatcaaggctatctgaacaaccacgcctaaaatttctgtattcatatactttttaccttaaactgtgtgtgttactttaaaacttttcgggtttgacgagcacgtacatcaaataaccgaagatcgcaatacctaatacgaataatgctgtgtacataatcaattctcctttttctttaaatattctcaaaccagtctacacatttccaaaatagccagaaacaagcgaaaccgcttaacaagcagaaaataaatgatagtgttattcccatgtttttaccttttaaatgattaataatcctaattatttgccataagtaatgctaaaggtatgccagaaaaagagaaaagtaagtaagctattgattttcaaaacaataaaaaagaactaaaaagaataacaaacggaaaacaccctaccattttgaaatggattatgctattatgaaaaacaatataatagagaggtgaaaataaaaaagagtagtaaaagaggaaatacaagtataccaaagtaccattgataaatcaaaaaacagaaattttgcaaagtacccaaaacagaaagccccttgattcgttgctgaatcaaggggcttctctaaaaacggcggctacctactctcccactgttacgcagtaccatcggcgtgacgaggcttaacttctctgttcggaatgggaagaggtggaaccctcgtgctataaccacctgaataaggttatgacatgatgaaaagtaaaatctcaagttcattactagtatgtttctgttctctgtttccagtttctgtatcagtaatccgctaaacgtatatacccaaccggtacatatttgaaagaaagtgaacgggcaattagtaatgctcggctttgatgttaccacctttacacctgcatcctatcaacgtcatcgtctttaacgaccctaagaaatctaatcttgtggctggcttcgtacttagatgctttcagcacttatccaatcccgacttagatacccagcgatgcacctggcggcacaactggtaaaccagcggtcagtccaacacggtcctctcgtactagtgtcagagccacgcaaatttcatacgcccacgatagatagagaccgaactgtctcacgacgttctgaacccagctcgcgtgccactttaatgggcgaacagcccaacccttgggaccttctccagccccaggatgtgacgagccgacatcgaggtgccaaacccctccgtcgatatgagctcttgggagggatcagcctgttatccccggagtaccttttatcctttgagcgatgtcccttccatgcggaaacaccggatcactatgctctagtttcctacctgatcgacttgtctgtctcccagtcaagcgcccttatgccattacactctacggacggttaccaatcgtcctgagggcacctttagaagcctccgttacacttttggaggcgaccaccccagtcaaactacccaccaaacagtgtcctcgcatctacgagttagaactcaaataatcaaagggccgtatttcaacagcgactccacaaatactggcgtacctgattcaaagtctccggcctatcctacacatcaattacccaaattcaatgttaagctatagtaaaggttcacggggtcttttcgtcccatcgcgggtaatcggcatcttcaccgatactacaatttcactgagctcacggttgagacagtgtccagatcattacaccattcgtgcaggtcggaacttacccgacaaggaatttcgctaccttaggaccgttatagttacggccgccgtttactggggcttcaattcaatgcttctcttgcgatgacatctcctcttaaccttccagcaccgggcaggtgtcaggctgtatacgtaatctttcaatttggcacagccctgtgtttttgttaaacagttgcctggacctattctctgcgcccaactctcgttgggaccctttatcccgaagttacagggtcaatttgcctagttccttaaccgtgaatcactcaagcgccttagtatattcaacccgactacgtgtgtccgtttgcggtacgggtaccttaaagattaagtttagcggattttcttgggagtatgtttacacgcactattggattgttccgaagaacgttccatactatcaggttcgactctctttgtggatttgcctgcaaagatcaacatctacacccttcaacggactattccgtcagtccgcggcgctatcactgctccgtctccacgtcactccttaaggtagtacaggaatattaacctgttctgccatcggcctcaccgttcggctgagccttaggacccgactaaccctgatccgattagcgttgatcaggaaaccttagtctttcggcgagggggtttctcaccccctttatcgttacttatacctacatttgcttttccacacgctccagcaaagctcacgcttcaccttcgacgcagagtggaatgctcccctaccgatccttacggatcccatagcttcggtaaattgcttaatgcccgattattatccacgccaaactcctcgactagtgagctgttacgcactctttaaatgaatggctgcttccaagccaacatcctagctgtcttagcaatctgacttcgttagttcaacttagcaattatttcgggaccttagctgatggtccggattcttctcctttaggacatggaccttagcacccatgccctcactcctgggatcgaactactgcgcattcggagtttatcaagacttgataggcggtgaagccctcgcatcttatcagtcgctctacctcacagtagtaattcccaaggctgcacctaaatgcatttcggggagtacgagctatctccaagtttgattagcctttcacccccaccctcagttcatccggaagcttttcaacgcttatcggttcggtcctccagttagtgttacctaaccttcaacctgaccaagggtagatcacttggtttcgcgtctactccttccgactaatcgccctgttcagactcgctttcgcttcggctacacattttgaaatgcttaaccttgccggaaaaagtaactcgtaggttcattatgcaaaaggcacgccgtcacaacttacgctgctccgaccgcttgtaggcgcacggtttcagggactatttcactcttctattcgaagtgcttttcacctttccttcacagtactggttcgctatcggtctctcgggagtatttagccttaccggatggtcccggcagattcacgcaagattcctcgtgtcccgcgctactcaggataccactacgcttcgtttagcttcgaataccggactatcaccgtctatggtttcattttccaaagaattcttctcactaaatttcttgcgacatcgtggtcctacaaccccaatattgccgtaacaacattggtttgggctaatccccgttcgctcgccactactaggggaatcattattattttcttttcctacaggtactaagatgtttcagttccctgcgttagcctcttgctatgcaagatgtcattccttcagaatgacgggttgtcccattcggaaatcttcggatcaaaggttatttgcacctacccgaagcttatcgcagcttatcacgtccttcatcgcctccgagagccaaggcatccgccatgcgcccttgcttactttctttcaaacgttttattcgcgtattggtattgacttgggaattgcttccggctgtcaatattgcatactcgaacacgtacggtttgatatatacttttagctcttacttttaattttactttttgtacatcatgtcaaagatcgttttctcttttcagagatcgtggagaataacggattcgaaccgttgaccctctgcgtgcaaggcagatgctctagccagctgagctaatcccccaagaggttattcaagaatgttgttcttagcgttcgcttctcctcgttcttgagcttggtagtcccaggcagagttgaactgccgacctctacattatcagtgtagcgctctaaccaactgagctataggactagttcaaccttgtctacctgatgttagactcggcttcttttttctcttgtttatctctatctatacttctatagatggttgatctatatattataaataaacaagtaccagtagtacaaaaaacagaacctttaaagtcattatttttaacgatggccgttttacattattcatgtagaattgcatcgtcttacgacatcgctccagaaaggaggtgttccagccgcaccttccggtacggctaccttgttacgacttagccccaattaccagttttaccctaggacgctccttgcggttacgtacttcaggtacccccggctttcatggcttgacgggcggtgtgtacaaggcccgggaacgtattcaccgcgccatggctgatgcgcgattactagcgaatccagcttcacgaagtcgggttgcagacttcgatccgaactgagagaggtttttgggattagcatcctgtcgccaggtagctgccttctgtaccccccattgtaacacgtgtgtagccccggacgtaagggccgtgctgatttgacgtcatccccaccttcctcacatcttacgacggcagtctctctagagtcctcagcatgacctgttagtaactaaagataagggttgcgctcgttatggcacttaagccgacacctcacggcacgagctgacgacaaccatgcagcaccttcacaacagccttacggctatactgtttccaatatattctgttgcaatttaagcccgggtaaggttcctcgcgtatcatcgaattaaaccacatgttcctccgcttgtgcgggcccccgtcaattcctttgagtttcaccgttgccggcgtactccccaggtggaatacttaatgctttcgcttggccgcttactgtatatcgcaaacagcgagtattcatcgtttactgtgtggactaccagggtatctaatcctgtttgatacccacactttcgagcatcagtgtcagttgcagtctagtgagctgccttcgcaatcggagttcttcgtgatatctaagcatttcaccgctacaccacgaattccgcccacctctactgtactcaagactgccagtttcaactgcaattttacggttgagccgcaaactttcacaactgacttaacaatccacctacgctccctttaaacccaataaatccggataacgctcggatcctccgtattaccgcggctgctggcacggagttagccgatccttattcatatggtacatacaaaattccacacgtggaatactttattcccatataaaagaagtttacaacccatagggcagtcatccttcacgctacttggctggttcagactctcgtccattgaccaatattcctcactgctgcctcccgtaggagtttggaccgtgtctcagttccaatgtgggggaccttcctctcagaacccctatccatcgtagtcttggtgggccgttaccccgccaacaaactaatggaacgcatccccatcgataaccgaaattctttaatagtaaaaccatgcggttttaatataccatcggatattaatctttctttcgaaaggctatccccgagttatcggcaggttggatacgtgttactcacccgtgcgccggtcgccatctttagtttgcaagcaaactaaaatgttgcccctcgacttgcatgtgttaagcctgtagctagcgttcatcctgagccaggatcaaactcttcattgtaaaagtatctttttcatctgttaagatgattttttgctctgttcaggacgccgtaattttattgaccttattcaaatacctattatcttcaatcgtatcgctactctctcggacaagtattgacggttctattttttttacttgtactacttgtattgtttatcaatatttcaaagaacttgctgctttcgttttaaaagcgggtgcaaaggtaaaggctttatttttaactaccaaactttttcggaagtttttttttattttttctttttactcatttctcaggctctctatgcgaaagggaaagaatgtataaaagaaaaacaaaggccgttttctttgcgaatcggactgcaaagataagaactttatttattatactccaaaacttttcggaagttttttgttcttttctttaagcgcaatctcgctttttcactatgtcaattctgcaaggctttcttctcttggaaagcgggtgcaaaagtacgcccttttagtatacaatccaaatatattaaactcttttttctaagtttttttgaaagaatctgctaaagtgctgaaggataatgatgttgtagaacatgtttttttatcataagtggattgggggcggaaacggtacacatgggatacattattatatcacacgcgggcgcgtaagcgcacgtaagagagaaaaagatgcagaaaaaagaaataacaaaattacagtcgaattacagatgagaaaaagacaacaggaagaaagagacaagaagacaatatagaaggaaagcaaaaaaatgaaccaaatgtaaaaagaatactagggacataccacaaagggaaattacaaaaggagattattaaaggggattattaaagaggatggattaattggaatggttaattgggcatgactaatagagtaataaacaggatatatagaaaaatattataaaagcaagagaatttattgtcaaccgttagaatacttgttctaagcagtctaacggttgactattccatatagatatgccggataaatactgagtggataccgatcagattctatatacaaaatcagaatatcattcttttttaggattctcgatccgcaggctgacaagttcaacccacttctttatgcccaaatcaaagccgcctttttctaatagatgaagggcgcccgcataatgaagggcagtttcctccctactacagttgatcttacaagacaactcacccagataatactccaggcgagccatttggatatagtccaataaagtataatcaccttcagttgacaaatcaatcaattctcttatcaaagcataggccagttcacattccgtataggttaaatccgagagaggtttgtgcatgacaggatgctgaaccagctggacaacaatgcgattaaagtctccgtacataggttgcgttatttaccgcatcagttcccgatggtgcgagggtttataaaaaagaaagagcgtggaaactatctgctcatgccaatcataggtatccgctaagacccccagtgaacacaagtgatagtcccacgcccaattgtgtatataacaaagtatatatgcaaaggtgcgcgagacctgtcactcattgtcattcactggtaaaaaattagcggatttttatgattgaatgcaacaaataaccgttctcaataaaaatattaaaaagttaccttcatcgctcgaaagtaaactacgacaaaagtagcaatttatatttagcaaacaaacaattttgacaaagaaataggtatgagacataaaattattatagctatatattggcaactttcaaatccccactaatttgtccttacgacttaaagcaatgtattgatgaattaaactcaggcggacgtttgccctgattgtatcaaaataaaaacgctcagggcaggttcctgcaaacgattttcaattttcatttctcatattctcatagtaaatacaataactatatataaatcaaatgcataacactatgagaaatactattcaaaacggcatttctcatagtattaccagcgttttatccataaaacaacgtatttctcatagcttttcatcactttcaaaaacatttctcatagattttccaagcgattccaaatacttttttacttgttttgcagagtattcaagttattcttcgacaaaaccgtaatagttagcatggactgcaacgaaaccgcagtaaaaaaagagtctactacaaggcaaaggaagcatcagactattatgaagtcaagccaagctagagatgtaatcaggtaatacttaaataatagattataaaatggacatgcggagtataaagagtagacattagcatatttatgtataagcagccatatcgttccactagagtggaaaggtctgtgcactagagtagacagtaccgttcactagagtgcaatgatctgcccactccagtgaaacgatacaaatacttatagcaaaacacaacaatgattaggataaaatataaagggataaggagaacttaatacaggaaagcagtaaagtaaggcaaggtaattgctttataaaaagttacttatataaaaaaggaagaataacaatcagtccggaaaaagactgggaggaacagaatgacgaccacaaaaaacaagaaatagagaaaatgcataaaaggaatatgagaataagaaaaaagtctatgagaaatacactattttcagcataaaaagctggtaatattatgagaaatgccgttttgaaaagtatttctcataatatatctatttgattatctttcgtttatcggaaaacaatgagaatatgagaaatgcaagtgaaaataggcgacaggagaaagtgtgcgtaagtaaactgaattcagcatttttttaagaaagagcaaaaaggaaaagagcaaaaagaaagagataaatccaggaatccgattggatccatataccgtatacctaacgagcaaaattcctcttcagttgttattcatacataaacatattctatacaataaaaataatatcatggagaaaaatatttttcagttagataatgagcagctcaaagaaattgctcgctcatttaaagcgaaagtagaagaaggtttgaatactgaaaatgcagagatacaatgcattcccactttcatcactccgaaagcaagtggcatcaatggcaaatcattagtactcgacttgggaggaacgaattaccgggtagcaatcgttgacttcagcaaaatgcctcccaccattcatcctaacaatggttggaaaaaagatatgtcgattatgaaaactcctggttatacccgagaggagttgttcaaagaaatggcagatatgataaccggaataaaacgggaaaaagagatgccaattggatattgtttttcttatccgacagagtccgtcccaggtggagatgctaaactgctgcgttggaccaaaggagttgatataaaagagatgatcggagaagttgttggaaaacctttgctcgactatctgaatgaaagaaataaaatcaagtttacgaacataaaagtgctcaatgacactgttgccagtttatttgccggacttaccgacagtagttacgatgcgtatataggtctgattgtaggaacaggcaccaatatggcaacttttattccggctgacaaaattaaaaaattaaatccgtcacataaagtagatggattgattcccgtcaatctggaatccggcaattttcatccaccgttcctcactgcagtggataatacagtagatggaatctctgggaatccgggaaaacaacgtttcgaaaaagctgtatccggtatgtacctgggagatattctaaaagccactttcccattggaggagttcgaagaaaagtttgatgcacaaaagctcacctctattatgaactatcccgatatttataaggaggtgtatgtagaagtagcacagtggatatatagtagatcagcacagttagttgcagcttcactgacagggcttatcatgttgttgaagtcatacaacaagaatatacgaaaaatttgcctggttgcagaaggcagccttttttggagcaagaacagaaaagacaagaactacaacatgattgtcatggaaaaattacgggagcttttcagtttgtttggtttggaagatgtagaggttgatatcaaaagcatgaataatgccaatttgatagggacaggtattgcggctttatcctgacacctccctgcctatcatcgtcattacagggtgatcctcccaatcgacttgcttataagaatctgacaggaatgtgccagaactctctttttaatgtaatagccctcgctacagatagttgtaacgagggttattcttcgtttataaagatttgcacgcacccttatctaacctattgcagatatatcaaatctatttcaagatttaatagacaatgtagtgtgtaaagtggttgtttacttaatcttcaaagcaaaaccacctccgggtgccaaatgaatcttcaacttactgtcattttttatccggatggattcacatttataatcacgcccgatccggtgagcatttgctccgtctttaaacaatgtagcgtcatacgtcttaccacccaggaaagagcaatccacttcgatgtcacgtgccgtccaatcggtgattccacctacataccagacatttccactccggcgtgctgttacgatatactctcccatcttaccatcaagcacgatactttcatcccacactgtcggaacatcagcaataaatcctgttgattccggttcgcgcatatagttgctcggcgtatcacacaacatattgaaaggagattcaaatacaacatacagagcaagttggcggcaacgagttccctgactcatcggttctgaattgcaaggataatagttacctttcgaagcattgcgcatcgctccttgagtgtagtccatcggaccggatacttgacgagtgaaaggaatcatcacgtcatacttcacctgatccaccgaagctgggctccatttcatctgttccagaccattgacaccttcaaagttcaatacattcgggtaagtacgattcaaaccggccggtttgtgcgttccgtgcaagtcgaggatcagtttgtatttagcacacatttcggcagcccgataattgaacgcagtcataagctgatcgtcacgatccataaaatcgaccttaaaaccttttactcccatgtcggcataatgacggcaaacgttctccatatcacgctcgaaagcataataaccggcccaaagaatgatgcctacatttttggaggctgcataatctaccaattctttcagattaatctctttcaccacttgcatcaaatccgcttgcagatttaccgcccagccttcgtcaagtatcacatattcaataccgtttgcagaagcaaaatcaatgtaggctttataagtcggattatttactccggtcacaaaatcaacgccatccaaattccaggcattccaccagtcccatgctactttgccgggtttgatccatgaaagatctgtcagacgggaaggggcagccaataaatagctcaagttgcttgctgccaaatccttatcggaagtggtaacaatgctcatgcgccacgggaaattccggggtttatctactttggcaatgtaagcttcatgctctttcaccaacatttgaagttgattgtgtccgccctgcatcatcttcttggggtatggagcgaaacgtcccgtcaaccgattttctccttcagcagcagacaaatagaggccgggataattctccaaatcggattctgtgatacaaaccttaacgccttctccggcatccacgactaatggcaaaaacatcaaacgttttttattcaacttcgataatggatcggtagtataagtattttcgaaggaattgaaatattgagagtcataatcaccgtcttttcctgtttttacataaggtacagaagctaccatatcggatgggaaatgataatctactgtttcatctaccacgttgaaaggtttcttcgcacggctgacaaagcggtaagcaataccatcattgtacgcacgaaactcgacattccagtcttttttaaaccgaagagtcagttcattatagtggtctctcaattcactggcacgatagaaaggagaaggaatcatctgatctacttttttcccggaagtgccggacaactttgctttctctccccagacttctccgttatccaatgtcatcgaaatcggagaaggagcaagaatctgccgtccgttacagcggatgtcataagtcagcttatcacctacggtaatcgtcgtttgaagctttccatccggagagttcaaagtaaattgtttttgcgcttgtaccgtaagcgtacatgcgacaatacataagaataataaaatcttcagttttttcatggttttaattatagtagttatcaaattatagaagaacgatacaaaaataaaataatatagtatagcaacctatatgaaaactaaaaaacagagataaaaaagaatacgtaattctatttttttcctgtcagggattgaatacaatcgacttcttcctgctgataaggtactccggtaggacgatagatatcatgaaaccataattccggttcttcacccgacggaatgacgtcatcccaagcaaaaatagtatttgtctttcctgcaacaaatccccaattgatggcgcctaccttttcttttttcatcaaaggaagaacattacaaaagcggctgtcattgcgacgggccatatattcggtacaaatcaacggacggttaagcatctttaaaaatttgatacattcgccatgccgttcctcattatcgtaattatgataagagacagactacctaatatccatattaatatcttcaagaacatcacaatccaaaagaattataaaaaacttctctcgttgatttacgagatatagaataaaaagttatttttgcaccgttttttaattttatcttaaactagtattatgtacaagatttttcacggcttccatctagtggaagcttatcaggacttaaagaaagccaaacggttggcaaaaaatcagacagtggccagatgtataaagctaaccgtagctattaccctgtcccttattttatggctcctccctattgacacatttggtatagaagggttaacagttatagaacaaagacttatttctatctttatttttgccacactgatgtgggtattcgaggctgtccctgcatggaccacttccgtattgattgtcgttttattgttactcaccgtttccgacagcagcttatggttccttactcaaggaatctcgacagaagaattgggacagacagtcaaatataagtccattatgcattgctttgccgatccaatcattatgttatttattggtgggttcatacttgccatcgcagcaaccaaaagcggattggacgtattgttggcacgcgtcatgctaagacctttcggaacccaatcacgctatgtactattaggattcattcttgttacagctgcattttcaatgttccttagcaacacggctacagctgccatgatgctcactttcctaactcctgtattaaaagtatttccggcagacggtaaaggaaaaataggtctggctatggctattcctgtagctgctaatgtgggtggcatgggaactcctatcggcacaccgcccaacgcaattgccttaaaatacctgaatgatccggagggactgaacctgaatatcggtttcggagaatggatgagttttatgttaccctatactattattgtattgtttatcgcttggttcatacttttacgattgtttccctttaaacaaaaaaatattgaattacaaattgaaggtgaagccaaaaaagactggcgttccattgtggtttatatcacttttgctatcacagtcatactttggatgtttgacaaggtgacgggagtaaactctaatgtagtagctatgattccggtagccgttttctgtataacgggagtcatcaccaaacgcgatctggaagaaatcagttggagcgtactctggatggtagccggcggcttcgccctgggcgttgctttacaagaaaccggactagcgaaacatatgattgaagctatcccattcaacacatggcctcctgtattaatgattgtcggctccggacttatttgttatgctatggctaatttcatctcacatacagctactgccgcattgctcgtccccatcctagccattgcaggaagcagcatgcgtgagaacctatcttccctaggtggggtagagactttattgattggagtggcaatcggttcatcattagcaatgatattgcctatcagtactcctcccaacgcattggcacatgccacaggcatgattcagcaaaaggatatggaaaaagtcggaataatcatgggaatcatcggactgatattgggatataccatgttgattatacttggttccaacaaattattataaaaaattctcttcccatacaaataagccctgtgagaagcaatcattcttacagggcttttttgctaatcagtcttacttgaaaacctggaaagaatctcttttgatattgctatccgttgtttcagatagtggcagacttcttcccaccgataatatgggaaaaaggatgtgaccaccggaatggttacttcttgctcattcaaaagtattttgacccagacttgacagttcttatcacgataaaacacccattgcacattagctgccatcggagcaatttcataatctttccaataaatggatacggaatcaggtgatgctatctgtatatccgtttttcctatacccatcaatgctacaaaaggaatgacagtttctgcatgcgcaaaacgaagatccacccgattgtccgattgcccgttaattgcctgctctgtcgtttgaataaactctgaaagtaacggccatgcaattgcaaccggcaacatatttccaactggtgctgcacttttagtcagatattgccgcaagttttgtgtttgccaataaccataccattctttatcattgagaatacctttcatattaaaagataagcctgtatcaggaagtatagctgctattgagaacaaagccatgacaaactcccgtttttcctgttctgtttcttgtcctgaggtgagaaaaatccttttcatgacaggtgtaaaaactatcttatcttgcacaaatgattcatacaaagaaatccagtcacctttctctttataataaacataaggcttgttcaaatcaaaaaaacgaagaagtgggttatattgctttcctgcacttttctttattaccaatgaggaatcctgtttttccataccagaaagaaaagcatccatactactaatacaacgaggaatataggaagctatcgcttcaattcgcgccgaatctacaaatatttcaggataacgcaatagcatacgctctgctattcccttttgttcctgctctcctactgccgacaattctccccatcgtccttcgaaagcttcggacagccgtaataccgtagcaagcagttcctgaccttttacagtcaatctgttttcctgctccgccaatataagcacatttctaaccttctctaatgcttttcccgaagtcgggaaccgtgctccgtgccttcctaaatgattgatataaaaaggaaccataccatcatggttcaaaacaggcagattctttatcaaaggatacggcatagccgttcctgcatatttctgaattgcactttgcccgaataaaaaagttatagggaaaagcagaccagctaaaaatatcaatattgctctcatccggcagaatatatatttgtttgtcaaacataacaaccggacatagaacaatgtttatatacgccacctactatttctcattttttaaattgattgccggataagatcctgtcttttccgactctccatacttgctcggacttacaccataatattttttaaatacctcacggaaatatttcgcatccgagaacccgaccctatcggtaatttccgctattgtatattcgccctgctttagcaattgtgcagcatgttgcaaacgtatcatccggatataatcagccggagcataacctgtcaagacctttaatttattaaagaaactcgtacggctcatgtgatggcgactgctaagcatttctacattaaaatccggatcccccatgttcttctctatacattccttgaccgaagcaataaatttccagtccagagtattagtacaattaaccggaaaactctgttcttcctcttcgatactattatagacctgacggagcaaagcacgattcgccagtaaattcttaatcgttgccttgagtattcctacactgaaaggcttggtgatataagcatccgctccgatttccaacccttcgagcatattcttctcatctcccagtgctgtcaacaaaacgaccggaatatgagacatctcaatatccccttttatcgctgaacaaagttcatctccgctcatttcaggcatcattatatcggatataacaagatccggattaaattccctgattatgataagtgcatcctttccattcggacaagcctgaatattatagctcgttttaagtatatccaccagataattacgtaaatcatcattatcctccactatcagaatacgttgtaaggaactgtttatctgggttatctccataaccgacaagtttgaaatgctagccggtatgatagtctccggacgttcatccggcagcttgggagaaataaatttagctttatgaagatggctatttcctttcgggaaagtaactcgtacacaagtgccttgttgttcattgctctgaatctgaatcttgcctttatgtaatttgactagtttgtataccaacatcagccctattccgctacctgtcacttttagattgacaacattgctacctctaaaacagttcctgaacaatttcttctgttcgcacgaaggaataccaattcccgtatctttcacctcaatgctccacgtgtttccttcctcacaagcggaaatgcagacactaccttcttcaggtgtatacttcaatgcattcgacaagatatttttcagaatagatcccatcttgtcactatcaaaccacacattcagatagtcaaaattgctttcataaacaaacctgacatgtttcatttcagcatatttgcgaaaagcagcacaaacatcattcataaaagtattcagctcatactcggaaacataaagagtggatgaatagacatctatccgttcgaaatttatcaagttcgttgtcagctgaagcaatgtatttacattcttaagagccatattcatatggggtaacgcctgttcggtcaccatacgattttctatgacttcctccagcggagcttttatcaacgtaagcggcgtacgtatgtcatgagccccgtattaatgaagaaccgtgtcttctcatccgacactttcttctgcttttgcaacatgatgatacgaaagatgataatcataaccaataccaacagaattgcatatcccaccatagcccacaaactggcccataccggaggtgttataacaatctgaatgttccttgtctcataagtcttatacttctcttcattggatacggcacgaatttgtaacgtataactgccaggaggcagatttctgacaagaatccggttatcctgactcggacggctccactctttatgataaccgtcaatcttccatgaataaagaatgttggaaggataatcataattaatggaagctacatcaagggaaaaagtattttgtccgtaggctagttccagccggtcagtttcgtcaatgtcctttttcaaaggagatccgtcatcacccgggtaaacgggatgataagctatcataaaatcgcgcagcaacaaacgtgaataatgcggttccggtatctgtatgtctgtcggaaatttaacagcaccatcattaccaccgaaaacaagcatgcttttattgcaggtcgtggcagaacctgcattaaaactgacactcatcaatccttgttcacgtgtccagttacgaaaagaatgtttctggggagaatagattgtaataccggtctccgtacccatcagaagactctcgtcctgacgcggaagaattgtataaatattgtcggaaatcaacgcacagttatcagtacgatattgatggataaactttttcttattaatgtcataaacaaggagtccggctccacgggtaccgatatacaagataccgtcttctctctggtataatgcacatatatagggagattcaacaggcagatcaatataccggtaaattccggattctttatcaagcaggtagagtcccattcgcgtaccaatccacatcagccggtcatccttctcctgaatggtagtaatagaacttactcccggatataaacgcacatttttagtctcaagattgatacgcttcagatgataatatccaccggaccagatatcacctcccgaatcttttttaatgtcataaatatattgatcgggacgtactcctgcaatggcagcaggagaaagataagttaccttaaaccctttcttcttctctatcttgtaaatacccgatgtataaccaccagcccacattacaccgggagagacttcacacagcgctaaaaaaatgtgattctcatcattcggtaccggatcaaaggaactaaagaaggaacgccattcttttgtatcagtctgatagaaactgataccgttactggttgcaaaccagaggtcaccgtcactatcctccaccacatcatgaacctgatcgttcaccagtgaccgggtattaccaagagaatgtcttatcaggtcataacttccataacggttgttacggattgtaatgccggtgggataatttgcgagccagatgcgatcttcttcatccacatagacatcattaatattatttccattcatcccgttataactgccataatcagctgttatatagggttcactcatgtatgtattcacatccagcttatatacacctcttcccccagtagccactagaagttcatgagcgtttaaagcagcaatctggttaatctctacatgattggggaattgacaagagatgatttttcctgttccccccatgtcatatataagtattccctctttatagtttcccacaaataactgctttgaaacagcatggtaataaagttcatgcactggagcgatgctttccaacgcttcatcaggaatcacctttaacttcccttcttctattccggcacgaaataaaccacttcccgtacctataaaaaaatggttaccatctgtctgttcaatggtagttatttcaccgtcgaccggcaccgacatatgtaacactgttccggtatgggtatcataccaggtaatgctatctttacagcacaaccatatacggtcattcttgtccaaataaccataatccagaaatgcttgcgacttatttctgatcagttccggatgcacataagccagttcaaacttgtcatgctgcgaatcatacctaaaaatacgacctttctgaccaattacccataatacatttccgttgtccatataaagccaattcaaggcaatccgtgaatccaacgtcatgttatcgtctgaaaagttgtaatgcttgatatgtttgccatcataacggtctatcccttcttgagtcagaaaccacatatatccccgtcggtctttttggatatggtatattttctgattattcaacccatcttccagtcctatgtacttataaatctgtcccctgcttacagtaccattaatgagaagaagtacaaacaaaaagaatcttctcatttttacaaaactactcatgtctttcactaatattcaaaaaaatactctgcaaaaatatgaaaaaattaattaaaacgaaagtcgaaaatgtatttatattttaaccatcaattattattaatactcatactcccagttttaaatttgttgaatattgtaaagaagagctagaatttcagttaccccttaatctgtaaaatttcataaatgcataaataaaaagctattctaatattattaaaatagctttttattcatatatcatctattaaacaatgcggtagttacactctcttttcctaggtaaaaagcctttgcttttatcagtggagcattacatgctaccggagtttgccattctatggaactttccgtaggctcactaccatcggttgtgtagcggattatcgcattgggaatggcagtattagccaatagtaatccatcccttatcataataccgggaggagacacccggaaatttattccccgctttgctaaacgtggcaattcataatctacaataccggcattatatttccgtttggcatccatatatactttgccgtccggagataatgcccacgatggttgaacattccaagcacgttctgtcaatccgaagacttttgggaaaagataatattctacctgttcaaaactacggattgtttccgaccatatttgtccggacagacctttaatattttgagaaccttcctttgtcaagggctgttttccgtttgaagcagctttcacatcaacaggttcacctttcaaattccgtcgtaaagacttataaatatcaaaaggcaacatatcaaacgtcacatattcatccacataaccgccccaacgcaatcccggttcctccacatgatagcaataggtcatatccaaatagaagttacccacattacagagtataatcgggtagcccgcattagctagcttatacggcacttcatccccaccctgttccggaatggtgttccagcaataatttaataccttactgtttctgaaatgttcgttaacggtattatccggattcataacaatgtcctgccatccgactgcctgtatgttacgtttgtccagcatttccaatatttgttccagaaaataatccttcagttcccgtatcttagtcagtccgttctcttgcataaaagtgcggcagatagaagaaccttcccaaataccttctggtacttcatctccacccacatggaaagcagtcagttctactcctgcatcctgatacatctgcacgatttcgtcaatcactttttcaagaaaatgataagtggaaggcatggcaacattaatcacattgtctgtgaaattttgtgccgacagatattgggaagtatctgcaaagtcagtcaaaagatattcttccgctttcggttggtctgtagctatgtatttctgataacgggcattcatggctttaatcgctgcccgggaatgtccgggaatgtctatttcgggaataactctgatatgcctttctttcgcatatttcaaaatatccatgaagtcactgcgagaataatatccattagccaatgaagcagtatctgtctcattccatccccaggcatacgcaggataaagacatgtctgttcatctgtggtatgtcctctacgagaagctatttctgtcaattcctccaatccgggtatttccacacgccaggcctcatcgtcactcaaatgtaaatgcagtacattcatcttatagaatgataatatatcgatcagtttcagcagctccgctttctttgtaaagttgcgggctacgtccaacataattccccgatgccccatgtccggataatcggttatatgaagattaggtatcggagaagaagttagttccatgttatctaataaggcaagcaatgtttgacaagcattaaatatgccatgtgtatcactagctttcaaagtcaaccggttattctttatcacgatttcgtaatattcatcgggatattgacaggtaataggaacctccattttcttcaattcaatgattgtttcttcatccttatcggaaacgctgcatcttaataatgaagtcaattgacttttcaataaaagagcttcctctttaaacgcatcatcaaacttcagacagactttttgagagaaagaagaaacaccgcccgtcttttccacttttttaggagcaggaaaaagagaaagcatatcacaatctaccggtttgctaaaatcatcattctgcttatagaaataatttccatctgcatagggaaagctgttcctcgagctaacccattgggtatcgggcttaaaaagctcgatctcgatggggacattttgcggttgtaacggttttcctttttcatcggtagttaccatataagccccttcaggaaccgaggacacattaatcacatttccttcactcaatatggtaaaagtgattgtttcacccggtggcaatgcctggtagtgttcagtggggtacattttatagtaagtcgaacccaaacattcaatttccagcggtgcattaataggttgctgataataaataggtgtctgattaaaatagatcacccaattattagtcaaggatttattcccattattcgtcagacagaatgtattcttaaaatatctggcttccacactatctttttccagtttccatgttaaggatagctgtgaggaagggggctgtttaccagccccacaaccaaacaggcatatccccaacatcattatccatatattcctcatagttatcataagggaattatttagttaatgaacgaatacattccacttcttctgtcgaataaggggttccatcactacggaatatatcgtggaaccacaatggaggttcaacaacatcaggcaatggagtgtcccatgcaaagatcgtatttgtttttccagctacaagtccccagttgattgcaccgatattttctctcttcagcattggcataatatcctggaaagtactattttgagtacgtgccatatattctgtacaaatcatcgggcgaccgtattgcttcaatgtatcaatgagttgctgatgcgaattcacgccttcatacgtgtggtatgttatcacatccgaattttccaattggaacttattcagattagtcaggctcatatcccaaactccggccgacagaggttgtgacggattcaccgttcgtccccacgtaaatatcttctgcaataacggcaaacttctttcaccgtatctatatcctcccgaacctccgggttcattatataagtcccataatacgattctcttatcatccttaaaggtaatcaggatatctttcacatagctttccaataccggaagtatcactgccgtatcgcctttataatacagatcacccgggtcacgtgcccatcccgaattgtgtactcccggctgtggttccggctgtttgccagcctgatatacaggattccaacaatcatccaggaagacgaagatggtagagatatgatgcttgtcggcaatagtaaggtattcattgatacgtttcttaaagccttccttatctgtttcccaaaccaggtgatgcaaatatacgcgcatacagttcatgcctatttcttccgcccaacccagttcacgatcaatagtcaccggatcaaaagtatctgcctgccacatctccatttggttgattgccgtgcttggaataaaatcgcatccacgaagccatccccattgtttataccactcattagcctgctctttcgtccagacctcacgaacagagacagttttctggttgcaggcaatcaacataacaccaataaaaaaggaaagtaatatctttttcatataatcgttttactttatcaaattaaaaatctttttattttctccacgtaaatattaccatatcacccggttcgactgctatcgtagagccgtccggagtagtcgttgaaccatttttcaacactctactaacagaactatccacatcgatagacaggttcatcacattacgaaaatctctatttactaccacaagatattgattaccacctttctccagaacagagacaacagcacctgtatcactcgtagtcaatgattttataggagtcggcagacttcccaaagccttcgtgccttcaggtatttcacttccggtgtgagatactgaaataacctgtgctcccaagaatatacccgcaagttgctgtacttcctgattaacagtcttgaccaaatcatacacttcagtcggatcatcatgttgaagtccgcgataggtaaaatactggattgcctgcgcaccataagccaaatcactgaaaacttgtaatctcaactcaggcaatgtcggtatcttataaaaatgagtttcatcaagtttatgggaaagtgcaagtgcaaatgcccagaacggcttattattctctttagcagcagccgatatttcttccagattccgataccagtccggacggacaatgctgggagcaccatttatagatacaataggataattgtcaaacgaaataaacggaacagggacttgttctataaacgactttacattttcagaataaagttctttcccccatgcccaattggggtacaaattgatataacaaggatgatggctgtcgatggttttaattttcttcaccaattcacccaaacccggcaaatcattcacttccggttcatccttcaaatgataggcatacaaagccggatgattcatcatcgcttttacaacctcttcggcagtagcaacagacaagagatccttacaagaagttatcattttcactccggtcttctgtgcggcgtcaagcaccttcaatgttgtttccaaatcatcgtaccatcccagataaatattaatgccggatgctttcatcaccggaaatttctccagcgacttgtctgcttccactccggtccatgctataatcgggaattctccatcagttgtagggatataagaattaccctgaatgatctcaatttcttgtgtctttactccattaggtaccacgcggaatacagccgtacgtccggttcctgtatttgcatttgcagtaattgtcacagttccgtttccacttcctttggccggtgagacggtaacccaagactgatccgtctcgtttacaaatttccattccgtattagattttatcgaatagacctccgtaaaaccgtcattaccgatctgtaacttctccaaattcccggaaatagaaaaagaggctttctccggatccatcgaacaagacattaataacattggcaacatcgagaaaaagaacgtaaccagaaatttcttactatatgttttcattgatatatacataattctattgaatattaaattaaagactattaatcatgcccccctcttaattgtaaggagtcaatcgtatcacttcactggctttatcaatatgtattgtataaagtccggctttaaaatcaggaccgggaatcaaatcaccgggagcgtttctcgttatcaggttagcaggctcaaccgtatatagattcttcgtgtcctcctcttgcgcccaaccatatccccgatagaacttaaatcccatagtttggtcaatgtaaacgactgcttcaaaggcacttgcaccgacctttttaaagaagaaccattggtgaggatatgcgaagtcccaagcaagcgtagccacataaggttcgcgtggaaatccgactccagtaccgagaatatacatcacctccggataaaaaacatcccgcggacgttccatatacatgaaaccatttgatgtattatatttcaagttataaagtaccgacggaccatcgaattttgctttgctccctgaaacatctttaaagaattccggccggagcatattggtgacatcactaccaaaacctataaaattaatcttggcactttctaccaactgaacatccaactggacatatcctcctcccacatcaaagaagcgggacttatcaatatcaatgctgtatgtcaaagtcttatcagccagaaagctcaacatatcaaaagtgatattctccaatgtataactccctaccttaggagtcggaatcgaagtagctgcatcatcagtcacaatcgcgatcttattgtctgaatatccccataccaaaccggaataatcaggtttattatttattatcttttcggcaactttaaaatggtcgccaatccctgccaaatccgccgcactcgtccggaaactataatccgtttcattctgactctccttgtccatttcatacacatttcccaaatcatcaacaaggtataattgggaaggtgtttccggacgggtcaccgccacacttgcggcctcatccaaagtcagagtcgattcattgccacctaaatcgtttacagcttttatagtcaccacaggacgtccattctggaaaccggcaacaaaaggtaaagtagcttcctcttcaataaccgcagaacgtccgctcaatcctttagacaaattcaagatttcggctccatccattgtcactaataattggaatgaaaccaaatcattatattcatcacttacttgtgcagtgaacttcactttatcaccagccgccacaaccgtttcaccattcactccccgcaatacggcattttctattttaggttttgaaggtgtaggccattccggccattcacttggcttactaacatcatcttttgcacacgaaaggagcaataacgacgacatgaataatacgtatatctttttcatttttcttaagatctctagtttaacaataatgaatgatgacattaattgcgagctgccgcaagatccgctttccatccctcacgttcaaatgtctgtaccaacacttttccataagattccgaagcttgttgaaccgcataattaggaataggcacatattgatgtgtaggagccactcctttgatcttcgctgtacgctgcgcatactgattaaaacggatgagatctattttacgcatcccttcatacaacatttcatgtcctctttccgtaagtaaagcatccaggaaagcgtcaacattcgctgttgccgatgacggaagatctcccagtccggcacgcttacgcacctcattgaccgcagcaatagcgtcagcggacggagccgcattgtttttacgtacttcggcttccgcatacatgagtaatacatctgcccaacgagctaacggtatatcagtcccctgaaaagccgtagctgtttccaccgggaatttattaatgataaaaccgtcccatgtagtagtattccggtcaatccaggttcctgcagtcgtataatatttggtcagaatcacttcacgacgtttgtccgaaggatcatacgtatcccaaaatttcggagacacgttgaaagtttgtccccatccctgcccttgcagatagaaaggagtcggatttccctgatcgtccactctggctgcattatcgggagtagcaagcatcatcagcgggttaaagttgccggacttattcgtaccatccgccgtttcatcacaactgacagccataatcacttccgaattaaagttattggcatttttgaattgctcgatataaggattgtcccctttcttgaaaagactataccgtcccttcaactcgttatacatatcaatcgctttctgataataaccggacatataatagccttcattcaggcaatgccgcatgatgcatacacgtgcatagtctttattgtaacgtccctgttccggctgcgtatctgcaatatactgataagcataatcaaaatcagccataatccactccgtcatttgctgcaatgtcggacgcaccagattttccagttttgaaggattaatcagatcgttcggatcgacaatcaaaggaacaggaccatatacatgcaataaataatacatcatcaatccacgacaaagacgggcttcagcaataaattcccttttacgctcttcggaaaccacttcggtagaagctttctccagtgttccaatcacattggtgaagtaggaaatctcacttactttcggaaagtggttcggcctttcatcacttaacgtaccgcttgtataataaacacactgactaaaatcggctttagaaaggaaataatatccgcctccccaaccattattccacacagccacctcatctgtcggataatcaaagaacttcagtacacctccggcagggatataccaaccgtgctgattgccacttgttccggcaccgatccaataggtccatgttgtcgtaaaaggcatatagcaggtcatcataaatgattcgtattcggcttcagtcaccggataattagaaacattcaacgtgccatacatcttgggatcaaaattatcctcacaactgcacatgataaatgcaatcatgacaaacaccttaaataatttattcttattcatattttcaatcttttctttcgttacaggttttcttagaaacatatttttgctccgaaggagtatgttctcgtcatcggatactccgctttggagccgtcgccacctgtctttatttcaggatcgacacctacaaacttggtaaaagtaaacgggttctgacagtcgataaaaactctgatagaactcacataatcacccactcttcccagcttctttcctgaaaggttgtatcctaaagtgatattcctgacacgtacgaacgaagcattctgataatcttcctcaaagcctacgttaccaggtaaagcgacagcctttgttgaagcaataccacgacggtttccattctgattggtttgggaattccagatagtatatacatatttgttcgaattcttgggactcgtgtagtacacatctccgacaagtgcccaacgatatgcatagttatagcgtgtacgtccgaattgtccatacataaatacatccagatcaaaatctttgtatacaaatgtatttccaaagcctatgtgaatttttggaagtgtattccgcatcttcacatcatcaatcgttattttgttatccccatttgcatccttaataatcggataaccgggctgttgcgcatctgccggcaaagatttctgcgattcgggcatattgcttttatctatgttgataacgccttccgtttcatagtaataataagcattcaccggttcgttcttgcggattcgatattcttcataataatagttgggcatccgttctttccaaacggcattatgatgtgataaggtcaattgtgaggtccacttaaacacacgggggatttcaaagtttagtgagttaatagtcgcatcccatccgtaacgtacataatgtccataattcatcgggacggaagatgtcatactaagcggagaggcagaatcatatcccagcaagttggttacatcattgcggaacatatcaaaacttccccagattctatctttcaggactgaaaagtctatacctatatttttcatggtagtcttttcccaggtaacattcgggtaatcaggaccgctaagcaaataaggcacataagtcactgaattgttagagaacttgatatattgggctgccagactgaaagtgccataaagcgaactacccagattatcattacctgtctgtccataactactacgaatcttcaactggtcaatccatgatatatgcttcataaacggctcgttagataatttccaagccaatgatactgaagggaaataggcatatttctttcccgggaaaaacttatccgttccatcgcgacgaatagtagcggcaaccacatatctgtcgagtacatccacacttgccctggcaaattgagaacgacgttcgtcggctgccctgaaagaagtcgggtagaaagcgccttccgcagcttccactttatcagcagcaatgtgatcgttaatctgttcgtagtcaagttcaagaccatttgaatcgttcgtataccttcccataccgactacggcatcgacacgtaacaaatctccaaactgctttttgaaagtcaacgtgccttccatagtttggtttctacgttcaacatatcccaaatgccctcttgatttatacatgtccataaaatatatatcagaaggaatatacagattacgattagcattctccttattaataccatacatcaaacggaaggacaacatatccttgattatatccacatcggcagcaaagtttagataataaccgcttgttttagtccggtcactaacttttatcatttcagccgggttagggtaatttgaatataaagtaggctttccgtcctcacctctgattggtaaataagaaggataagtcaatgctgattgtatggcatcgtacccatttccaccacctccgccaccggaagttgaatttgtatattcattttcgtttacattaacaattgctgtcaacttaagaaatggaagcaattgtgaagaaatgtttgtccgaagagcataacgttccatagcggagttttctaccgtaccttcctgtttgtaataatttccggacagataatatttcagcagtttagaaccacccgtaattgtgatattatgattattgatgctaccatcctttaatacacaatccagccagtctgttgtttgagcggcagctatctgttgaggtgagaattgaggtacccatttattatcaaaaggtttatcaccataaggatacataccgttcgtaaataaatagttttctttattgaaaatgttggcaacattcatatattcttccccactcaaaggttccagatacggatagtttttcacgatagaataatttccttcataagtgatttggggacgagtttcagtacctttctttgtagtgattaaaacgacaccattggctgcaccaattccataaatggaggcagatgcatcctttaacacttcgatagattcaatatcggcaggattaagtccggccaatcccgaacgattgatagagttgggcataacctggtttccgtttccaacctctaaagaagtggaaggcatcattacgccatccactataaagataggagtacctgccccacgaattgaaaggtcaactgctccacccggttgcgggcttgtcaacgtagcttccagtccggcagcccgcccaagcaacatctgtgacatattacttgttgcggctcgcgatattttttccgtttttaccgttgcaatggaagttgtcagattcttacgggtggtcgtcccataccctaccacaacaacttcatccaactgtttcgaatcttctttcatcgtcacattcaacgtcatcggtcgggtaattttctgcgtatatgtagtgtaacctattgaagtaaatttcagtgtcgagccttccggaacttgcaactggtaattgccatctataccggtaatggttccttgagtagccccttctatcatcacagtcactcccggaagaacctctccggattcgtccactacctttccggtcactttgatcggctgtttgttatcctgtggttgagatgaaactttgtttaatacaatctgacgtttttcaatcgtataagatactccttcgcctttaaaaagtttatccagcaccagagtcatccgttcatttttcacagtaatgcttactatacggcttacatcaacaatgtctttgttgtataagaaacgatattctgtctgattttcgatactagtcaagacctcctctacagtcacattcttcagtcgcaatgtaatttgggcggattgtgccaagataggtatactgatagcttgcaaagctatacaaaacaaccatatagcacagattctccccatttttacattcgcaggtacattaattctctttttcatttttctaattgaaataagtttcatacctttacatgtttggttattggttctacaaataagttgattaacgaataactgaatctttggaaaggaaggtgagtcagaccttcctttttttatcagttgtcggaagctgaattcactgattatgtctttctcatggcttgtattatttaaaggttaataaatgtgtttttctctcgtttctatcaataagacgtttctaaaaataaaagccacattggatatcgcattattttttcatctgcattattttttcttcaaactatcgtttatcccaaataatctttctatttttacccccgacaatagaacctttactacaatactatgccgaatatccaacaacagacttccgacgaccgttttctggtaatagcactaaaacaggatgataaacaggcttttacccgactattccatgcttattataaagatttggtattgtttggcggtacttacattccggagaaatctacctgtgaagatattgtgcaaaatatctttctcaaactatggaatgaccggaaatcattggtaattgagaactcactaaaatcatatttactgaaagcggtcaggaattactgtctggacgaattacgccatcgcaggattatagatgaacacattgcttacgaacttaaatcggattctatagatatagatacgacagaaaactacatactgtattctgatttatgccggcaacttaaaaatgcattggaacaattacctcctcaagaaagagaagtgttcgagatgagccgattagaaaacattaaatatcaggaaatagccaatcgcctgaatatctctgtcagaacggtagaagtacgtatcagcaaagcattgaagcagctccgcatcttattaaaagatttttatttactactttttttatttcttttccactaatgaatgtgggattttctttctgaaacgtctattatatataaggtaaaatgcatatgataaataaagattcagacatagaaattataatctccagatatctctcgaaagaggctacaccagaagaaataaaggtactggatgattggatatcggctactcccgaaaactataggagctttctatcacaaaagaatgtgtgggaagtcagtcacccggcttttaatccggaagagatagatgtggacaatgcgcacagaaaagtaatggagaagattctccatcaaaaccagccggtttccgttcgtcctaagttgtccttcctgcactattggcagcaagtggcagctatcttgcttcttcctttactgatattatctgcttatctttattttaaacccgcttctcaaattgcagagacttatcaggagttattcactccttatggcacttggtcggtagttaatctgcctgacggttctaaggtttggctaaatgccggaagttctttaaagtatccgactcaattcaatgataagcaaagagttgtttcgatgcagggtgaagcctattttgaagtagaatccgataaaaagcatcccttcatcgtaaaaaccaaacaactgactgtagaagctaccggcacagcattcaatgtgaacgcatacgctccggatcatgtagcagcagtgacgttagtaaaaggaaaggtcgcagtcactcttgaccagaaaaagacgatttccctttcaccgggagagaaaattgactataatctggccacttctttatataacgtcaataaaaccaatacttataaatggtgctcatggaaagatggaatactcatttttagagatgacccgctggaatatgtattcaagcgtttgggacagacttataacgtggaatttattctgaaagacgctgaattaggaaagtattcctataaagcgacttttgaaggtgaatctttaaatgagattttgcgcttgcttgaaatgagtgcacctattcgctgtaaagaggttagtaatcgcaacaccaataatgagaagtttgaaaagcagcgtatagaggtgagtaggactatgcaataaaggtagtttcagtctgtgtaaaacgccgtttccgtatgttctgacaagggataattctcaatactatgagaaaaaatactcataggaatgagaaaaaattctcactgcgatgagaaaaaatactcatcgcagtgagaatgcttgagaatttattacttcatcttatacaccagtgtaccaccttttacaatatcttcatgcgagatcgttttctttgtatatggttcgccattcaatgtaatactatctacatatttatgttctttcgacaaattctccgcaataattgtgaaagtcttgccatcggccaaatgcaaggtcatcttcggcaactgtggagcaccgaatacatattccgcacttaccggatctaccggatagaatcccatcgcactaagcatataccaggcagacatctgtccgcaatcatcatttccgcaaagtccgtcgggtttgtttttgtattgagtatcaaatatttcacgaaccaattcctgtgtacgttccggacgaccagccagtgcatacaaataagtcacatgatggcttggctcatttccatgagcatattgcccgattaatccagtaacatctgccaaactttcaccttctagcttaaccgtaaacaatgagtctaatttattcaagaaaggtttttctcccccaaacaactggattaatcctggaacatcatgttgtacatgccaagtatattgccatgcatttccttccgtataatctccaccgacactttcagaatgtgccaacgcacttgggttaaacggagctttccaagttccgtcagctttgcgcggacgcatgaacttcgtctccgaatcgaaaagattcttataatagtcagcacgtttcgcgaagtaagcggcatcttcctctttacccatacgacgtgccatatcggcagcagcataatcatcatatacagattctaaagtggaagatacagattctgcttttatcagatctgtcgggaaataaccatatttcgtataaacctcccaatcagacttcaacggatgagatacagtctgcgtcttctttattatattgaaagcacgttcagcgtcaaagccacggaatcctttgcgataagcctcggcaatgactgatacgccgtgattaccaatcatacagaaattctcttttccccacaatccccaaataggcaggaagccttgcacttcaccctgttcgatgagagaattcacaaaaccgtccacacgttcgggaatcactaatgtataaaacggatgagcggtacggtaagtatcccacaaagagaacgtagaatagaaagcaccagttccggcttttacaatagagtcggcggcattacgatacataccgtctacgtccgaaatttgattaggctgaatcaatgcgtggtagaaacaagtatagaaatttgtcttttcatcatcggtaccctctatttcaatacggctcaaatagttattccattcattgtgggcggtagctcttactccttcaaaatcccaggcaggaatttctgcttccaaattctttttagccccgtctatgctggtggtggaaagagccactttcatcatcagctcgtctcccggctgcatgtcaaaagaggcaatgatgcgttttcctttttctgtttcgcccatcggaagataaagtgaatcgactaccggacggttgaatttcatcacaaagaaataatcttgattgacccataccgtgttattgacatgtcctgtcagtgtttgagcatcttcccagttcacttcacaactattgacttgtgaatgatattgttcttctctccatgcaggaccatgttgcaagtcaatcaatatagaggcagaatcagccttgtgataagtatagcggtgaagggcagcatggatagaggcagtcagttccgcttttacctgtggatcagagagctctgcggtgtaatatcccggagtagccgcttctttatctttagggaaatgactgcgataggcatcccacgcacgtacacgtgtaccggtgaccggcatcaccaaaatatcacctaaatccatacatcccgttccattcagatgtgtttgagtaaatccccaaatcagggaatcctcataaacatattcagaacagtagcgccaaccaactgctcccgtcacaggactggtctggatcataccgaaaggataacacgcgcctggaaatgtatgaccattatcagcagcaccgataaaggtattaacgtattgagtataatcttttgtatccgtcttttcagccggagtacaagaagaataaaaaaacaagcctgctgccagagttgcagccataaaaggggtttttcttctcatggtaaatataataatgttaagttaatgtcgcattatatatgctgatatttatctaatttttcacgatagtagctttctacatctttccagtggtaataaggagctacgtctgttttcaccggtagtttagcttccttttcattaagtaatacttttaccaatacatcgttacttccttttttatggaaaaagacgaattgcacgttactagccatcgggaaaatatcatacgctctccattgttcggataacttttctacgtcagggtaagattctccataatgattcagttccaataaagcgactaacggtaacagacaagactcatgaccaaatcttaaagtggcctggttcttaccttctttcaaagcagcatctgccctatctaaaatattacgcaacaagtcggcttcccgatagggcatcaaaccatccgttacaggagaacaagcgtgtgtcagataccaatataagttgttacaactccataaatcataacactcttcatccgtgaaaagagaatatagctgcatatctgtatcatgactctgcatattacaagccaaatcaaaaagacgtctcatcaggcgcgcttcatcaacgtttgcttttacatacgcttcgtctgtaaacaatgttttcatcaaccgttgcggacgtacatgggtagcttcaaaatctttctgaaccttcttcactttatcggaactagctattttactcaaatccttagcaggaggattcatgtaatacatatcatggtaacttgcatcattcttgatacatagattaggattcatcgcctgcaattggaggcattcggatgtcatggataatatacaccggatgacaactgtggaacggacatccacttctgttccatccgcaaatatctgtgggaaattagtatacatacgctttgcaattcctctgtgttggcgtgctcccaccgaagtcagttcaccaagacgaccttccgccatatcagccatgcgcaaaacaatatccagtgtgtttttacctgttgcagtaagtttgtttaaagagtcggcttttaataaagtttgcttggggaaacgataatcattcggatcaatcaaataccgtgaaccatgacgcatatatgtgctgatataaaaaggttcgtaccccttaggagcagctgtctgcttggcagtaggcgtgggatatgcataataattattagcggataaataccggtttgcacggatctcttcacgagcagtttgtgcttgtaccgtccatacaaacaaaagcaataaaaggatagatgtgagttttttcatgatagtattattcaatgtattaatagttgtgccacaaaattagagatttcttctcatttaaaaggatttgatacagacaaatatacttaaatcttaaatgaaggaagttcctatttatatggattcgctgtgataaaacaaaaattcgtacgacttattgaataaatatcaactcaattatttatctttgttagcttaataacaagctggcgcaaaaaacaataagtataatgaaagatttcttgaaatttacacttgccacggtgacaggtatcattttgtcaagtattgtattatttataatcagcatggtaacgttgtttggcatcatgtctgcttcggacacggaaacaatcgtaaaaaagaattctgtaatgatgctcgacttaaacggaacgttggttgaacgtacgcaagaagatccgctggatattttatcacagttgttgggtgacggttctaacacgtacggactggacgatattctttcttccatccagaaggctaaagaaaacgaaaatattaaagggatttatctacaggcaaactcattaggcacctcctatgcttctttgcaggaaatccgcaacgcactgctcgacttcaaagaaagtggaaaattcgttattgcttatgcagactcctatacgcagggactttattatctttccagcgcagccgataaggtgttgctcaatcccaaaggaatgattgaatggcggggtatcgcctctgctcccctgttctacaaagatctgctgcaaaaaataggagttgagatgcaggtgttcaaggtgggaacttacaaatctgccgtagagccgtttattgctacggaaatgagtcctgccaaccgcgaacaggttaccacatttatcacttctatctggggacaggttacggaaggggtatctacttcacgtaatatttctgtagactcactgaatgtttatgcagatcgcatgctcatgttctatccggcagaagagagtgtaaaatgtggattggctgatactctgatttatcgcaatgatgtgcgtaattatcttaagaaattggtagagatcaatgaagatgataatcttcctatattaggattgggcgacatgatgaacgtaaggaaaaatgtgccgaaagataaaagcggtaatatcgtagctgtttattatgcatccggtgaaattacagactatccgagctctgcaacttccgaagatgggattgtcggttcgaaagtaattcgtgacctgcgcaaattgaaagataatgatgatgtgaaagctgttgtactccgtgtcaattctccaggtggaagtgctttcgcctcggaacaaatctggcatgctgtgaaagagctgaaaacaaagaaaccggtcattgtctctatgggtgattatgctgcgtcaggaggttactatatctcttgcgttgccgatacgattgttgcagagcctactaccctgaccggttctatcggaatcttcggtatgattcctaatgtgaaaggattgactgataaaatcggtttaagttatgatgtcgtaaaaacgaataaatacgctgatttcggaaatatcatgcgtccgtttaacgaggatgagaaatcattgcttcaaatgatgataactgaaggatatgatacctttgtaactcgttgtgccgaaggacgtcacatgacgaaggaagctatcgagaagattgctgaaggccgtgtatggactggggaaactgctaaagaactgggattagtagacgaattaggtggtattgacaaggcactggacattgctgttgcaaaagccggtatcgaaggctataccgttgtgtcttatcctgagaaacaagatttcctgtcttccctgcttgatacgaaaccgacgaattatgtagaatcacaattactgaaaagtaaattaggcgagtactaccagcaattcggcttactgaaaaatctgcaagaacaatctatgattcaggcacgtattccgttcgaactgaatataaaataaaccgtaatacatggacgaacactttatcaagatacataagtggctctaccctgcctcctggctctacggagcagtggtaatgatgagaaataaactctttgactgggaagttcttcaatcaaagagttttgatatacctattatcagcgtgggtaatctcgctgtaggagggacaggaaaaactccacacactgaatatctgataaagtttctttgtaatcaatataaggtagctgtattaagccggggatataaacggcacacgaaaggttatgtattggcaactccggaaagtacggcaagaagcattggcgacgaaccttaccagatgcatcaaaaattcccgtctgtcacagtagctgtcgatgaaaagcgttgtcatggcatagaaaagttgcttgcactgcaaaagccttcaatagatgttatcctattggacgatgctttccagcaccgatacgtcaaaccgggattgagtattctgttaacggattatcaccgattattctgtgatgacactttgctccccgcaggacggcttcgtgaaccaattagcggcaagaatcgggcgcaaatcgttattgtcaccaaatgcccgcaagacatcaagcctattgattataacattatcacgaaacggctgagcctttatccatatcaacagttattcttctcatcgttccggtatggtaacctgcaaccagtgttccctaccatgtctccggacacaaatgcaatttcgacaaaccatgaggttgctttgtcctcactgacaaacactgatatattattgatgacgggaattgcctcacctgcccctattctcgaaagactggaaggttgtaccaaacaaatagatttactatcgtttgacgatcaccacaatttcactcatcgggatatacagcttatcaaagaacggtttcataaactgaaaggagaacaccggttgattattaccaccgagaaagatgcaacacgcctgattaaccatccggctttggacaaggaattgaaaccatttatctacgccttgcctattgaaattgaaatattacaaaatcaacaagataaatttaaccaacatattattgactatgttagagaaaatacaagaaaccgcagcttatctgaaaggtaagatgcataccagtccggaaactgccattatactaggcaccggacttggcagtttggcaaacgaaatcaccgagaagtatgaaataaagtattcagatatccccaacttcccggtatctaccgtcgaaggtcatagcggtaagctgattttcggcaaactaggcaataaggatatcatggctatgcagggacgcttccactattacgagggttattcgatgaaagaagtaactttccctgtacgtgtcatgcgtgaattaggtatcaaaaccttgttcgtatccaatgccagtggcggtacaaatgcagatttcgaaatcggtgacctgatgattatcactgaccatatcaactatttccccgaacatccgcttcgcggaaaaaatatcccttacggacctcgcttcccggacatgagcgaagcatactgcaaggaattgattagtaaggctgacgagattgccaaagaaaaaggaattaaagtacaacacggagtgtatattggtacgcaaggtcctactttcgaaactcctgccgaatataaattattccatatccttggtgctgatgcagttggtatgtctaccgttccggaagttatcgtagccaaccattgtggtatcaaagtttttggtatttccgtcattaccgacttaggagtagaaggaaaaatcgtagaagtaacacacgaagaagttcagaaagccgctgacgctgctcaaccgaaaatgaccacgatcatgcgtgaacttatcaaccgtgcctaaacaatcatcccgatttatgagaactgaaatagcatctcttggtgagtttggtctgattgaccgcctcaccgagggaatcaaactggaaaacgaatccagcaaatatggagtgggcgacgatgccgccgttctctcctacccttcagaaaagcaagtactggtaacaaccgacctgcttatggaaggtgtgcattttgacctgacttatgttcccttgaagcatttgggatataaatcagcagtagttaatttctccgatatttatgccatgaacggtactccccggcagattacggtatctcttggtctttccaagcgtttcagcgtggaagatatggacgaactttattccggtatccgtctggcttgccagcaatacaatgtcgacattgtgggaggcgataccacttcttctctgacaggtcttgctatcagcattacttgtatcggcgatgccgataaggataaagtagtttaccgtaatggagccaaagacactgacctgatctgcgtcagcggcgacttgggagcagcctatatgggtttacaacttttggaacgtgaaaaagtcgtattgcaaggtgataaagatgtccaaccggatttctccggcaaagagtatttattagaacgccaattgaaaccggaagcgcgcaaagatatcattgagaaattggcagccgccaatataatccctacttctatgatggacatttctgacggcctgtcatcagaactgatgcatatctgcaaacaaagcaatactggttgccgcgtttacgaggagcatatcccaatcgattatcagacagctgttatggccgaagagtttaacatgaatcttacgacttgtgccttgaatggtggagaagattatgaactactctttactgtttccatcgccgatcatgagaaaatttcacaaatggaaggagttcgtctcatcggacatattaccaaacctgaacttggctgtgcattgattacccgtgatggacaagaattcgaactaaaagcacagggatggaatccattaaaagaagataaataatagatttcatcacatacctgaaatatttttcatcttatacaacactgataattagccgactaactttttatcagtgttttttatttccataagacttgcagaatccaaaagtttcactacctttgcaaccgcaaaagagatattaccggaccgaacaagcacgaggtgccatagctcagttggtagagcaaaggactgaaaatccttgtgtccccggttcgattcctggtggcaccactaacgattcggtaataaaaaatcccttgaacttttgaagttcaagggatttttttattcctcgtattgcaatttgcaaccgcctatactttagaactatgcagttttttataaatctccacacgagcatctatttctgcttgagtcaaatgcgcaggaagttcaatggtagtccgcggagttattgctaccaataccatatctcccaaaccctttttatactctttaataacattttcagtaaactgactggatgaaataacatcacgcattatattaccttttttcatatctctaattattttgttttttattttacacacaagcagaatatacacttccctatacaggtttagattgagctaaatcttccgatgtagatttgttttccaaagagatattgatcgcattcatgcctttcactccacgctcaaggtcaaatgttacgatattattttctgcaatattgccaatgacattgtttacatgaaaaaagtatttctcaacacctgaaaggtctttaataaagccaaatcctcttgactcattaaaaaactcaacccgtcctctcaagatcgtcggctcctcttcttcctttttaggagttgctataattatttcatccggattaatttcttccttctttatatcctctgtcggaggagtcgaagttatcattccgttctcatctacataggcaatcatatcctcaaagctatttgagctgcccgataatttcttgctttctttctttttcagtttttcttctcgtttagcgagtcttttcttttcattttcacgtttaccaactgtcatggattttgccatagaatttatatttagttttatattaattttaaagagattgttatttgttgatttcaaatagtataactggctttattcagcttcttacccgtcagtttctgaatatcattaacgagtttacgctcttcctgcgagcagaatgtcagtgctgtccctgtattcccggctcttccggtacgtccgatacgatgcacatacgtttccggcacatcaggaagatcatagttgataactaaaggaagttcgttaatatcgatacctctggctgcaatatcagtagccaccatcacacgtgttttgcccgacttgaaattgcccaaagccaactgccgcgccgcctgacttttatttccatgaatcgcctggctaccaattcccgccttgcccagtatctttacgatcttatcagcattatgcttcgtacgtgaaaataccaacaccgactgatcttctgatttttgcaaaatcgaaaccaataaaagactcttttcctttttctctacgaaataaaccatctgttcaatagcatccacagtcgatgatttcggagttatgctgattcgtacaggattcttcaacaaagaattcgttaaagaaataattgtatcaggcattgtagcggagaagaataaagtctgtttttctttcggaagtttcggtaatatccgcttgatatcatgaataaatcccatatcaagcatgcggtctgcttcatcaagtacaaaatattgtatcttatccagatggatatgcccctgattcatcaagtcaagcaaacgtcccggtgtagcaaccaggatatcaattcctttgtgtaacatgtcaacttgaggacgttgatttactccgccaaaaataaccccatgccgcacttgggtatatttggcataatcattaatgcattcacttatttgcaaggcaagctcacgggtgggcgtcaaaatcaacgctttaatcccccggcacttggctgcctctttattcatttgcaaatgttgtataatgggaatagcaaacgaagcagttttacctgttcccgtttgcgcacagcctaatatatctctttttgctaatgcagccggaattgcctctccctgaatgggagtgggcactgcatatcctttttcttcaatagcttttaaaatcggttcggttatatttaattctttaaatgtcataattgttatttttgctgtatcaaaacagctattaatttatattgtaaagggactgacaaactccatcatgggaatgaaaatcccgtaggttaagccagtttatgggttgccaagaaaaactcgcgctccagtgtactcattacttcttttacactactgattttttcagcgagaaaagcattgctaccggcaaaagcatagccttttttcatatttcctttggctgcattatataaagccttaataatgcaataagggctttttgtataatcacatgttttgatacaatggaatgagcaactcttaggcctctccagtccactattcacattgtgaataaattccccgtcaatagctcgtcctggcattcccacaggactttcaataataagaacatcttcggacttggagtgaatatatacttccttgaacgtctcggaagcgtcacattcctgggtggtaacaaatatacttcccatttgtacccctgaagctcccagctccataaaatgtgcaatatcttcacccgtcgaaatgccgccagcggcaatcaccggaatctgtttctgttctttataactggatgcaatcattaccacttccggaatcaaagcttccaaagcataatgctgatcctgtaattgttcttttttaaatcctaaatgtccaccggctttaggcccctccaccacgattgcatcgggcagataattatagttcttctgccatttatcgcagatgattttggctgctcgtgaagaagatacaataggcactagcttggttgtactctctggagtcagatatgaaggcaggtcgagtggaagcccggcaccggaaaataccacatcaatcttttcctcgattgcggtgcgcaccatatccgcataattcgataaagcaaccatgacgtttacgccaataataccttttgttttcgcacgtgctttccggatttcctctttcagcccgttaatacatttttcaggataagtacctttccctttggggtataacaaacctaaacctgcgcatgatataacgcctactcctccttcgtttgctactgccgaagccaaacccgagagcgagatacctactcccattccaccttgtattacaggtgtttttatctcaatatttcctataaagaatgatttcatatgttttattttgctttagagcaattgaacaagataaacagtgtgagcacactttattcaagcgctcaagattggccctgtcattgactatttgccttgttgggtgtaatttattaaacctttactcctgacttcttcaagagtattgtgtattacaaaaaagtctaataaatctattttcagaatggaaagtgcaggagtagatattcctgatattgcacagaaaaagagccagaattagcagaacttaaatgtaatatgattttttgtcttcccctgtgtcaatcagaagactcctccgttgaatcatgaaacggaaataacttattaaataaaagcagaagataatatcttctgcttttatttggatattaatatcttctagagttattataaccaccacggccaccaccgttagacggtctttcagtacgaggacgtgccacgcttactgaaataactttctggtcgtattcaactccattcagttcgtcaattgctttttgtccttctgtatcattcggcatttctacgaaagcaaatcctctggatctaccagtttctctgtcaaaaattactttagctgaagaaacttctccaaactctgcaaataaatttgttaagtcagcatcattagtgccatagcttaaacctgaaatgtaaatgttcatttaaaattttattaaaataaatactaatttggagtgaggaggataattaaagacaaggactgcttgctaataaaatattataaagaagaactatacgataatgattcgtaactcaaactcttggtacaaaggtaacacaataaatcagaataatacatttatacccgttctttttcggaagaaagacgataattatcatttattagcacacaattcatcctaaatcggcgagatacacaattttgcctatcattcttgatattctcttgtaatatatctacttttgccattacataaattatcaagtcccactttatggatgtcagaatagaaccaagttggaaacaacaattacaagaagaatttgacaaaccatacttcgaaaagttggttacattcgtcaaagatgaatacaaacgggcacacgtcctccctctcggacatcagatttttcatatattcaattcctgtcccttcgaaaaggtaaaagtagttatccttggacaagacccctatcccaatcccggacaatattatggagtctgtttttctgtgcctgatggagtagctatcccaggttcactaagcaacatcttcaaagaaatacaccaagatttgggaaagccaattccaacttctggtaatttggatcgttgggtagctcaaggtgtattcccgctaaactctgttcttactgtacgtgcgcacgaaaccggttctcatcgaaatatgggttgggaaatcttcacagacgcagttatcaggaaactaagtgaaaaacgggagaatttgatatttatgctttggggaagttatgcgaaagagaaacgatctttgatagataccaacaaacatctggtactaaccactgttcatccctctccccgctctgccgaatatggtttcttcggttgtaaacacttcagtaaagccaatgctttcttgcatagcaagggaatagaagaaattgattggtaaataaacgatttctcaaaacagattatcagtacccaaaaacattcgctatgaataaatcaaacaatatcactcgggaagaaatgtgggcaaagcaatgcttgtctgctaccgatattgattacgctgtgtgggaacgggataaatccatacttcaccaactttcaaaaatctgtcacaactgcacatttgttgtcgatgtttacaaatgcaattacacgtatgcatcctcgaatttcgttgatttactggggtatgacagtcacaagatagaaactttggaaaagcagggagattatttagaatcacgtattcatccggacgaccgtgcgcaactggcagcattacaggtcacgttaagccagttcatttacagtctgcctctcgaacagcgaaacgactattccaacatttacagtttccgtatactcaatgccaggcagcaatatatacgtgtcactagccgacatcaagttttggaacaagaccgtaacggcaaagcatggctcgtaataggcaatatggatatttcacccgaccaaaaacattccgaaacagtagactgcactgtcctaaatctgaagaacggggaattcttctctccttcctctttgctaatgccttcttcgctcaacctcactaatcgggaaatagagatattacggcttattcaaaaagggttgttaagtaaagagattgcagacaagctatgtatcagtattcacactgtcaatattcaccggcagaatctgttacgcaaattaggtgtgcaaaattccatcgaagccattcgcttgggacaggaaaccggactactaagttaattaacccatacgcactcttcccgaagctaccagtctgtctaaggcatccattccaccacacccaccgccggatgcaatcttctccattcctcaaattccggataactacgtacaccatcctgaatcacagcttgataatactccactcccataatcttttccgtatcaggcgtttcgtattttaatttcaggatagccagtctcatttcatctgtcaataccgcagaaatgcgttcggccgccctttcaaaatagccatcataacgagagccttcttggatatgaatcatatccatttgccagagttctccttccatatcctgataccatgcatgccactctatacacgcttctgctgtatgtaataaattcgtatattcaatcttctttacggacgtattttccgccaattcagccatcgcccgaaagctggcagacaaatcccaaggagaagtataaatatgaaaatcaatatcccgatgtttcaccaataatcctgtacgcaacgaacctaccagattcactttggcaccaatcccctcccatatccgaacaatacgggtatcctctataatctcccaagctttctgctggttacgttttgccaattcaagaatattcatctttatccttattaagtaagtatgcaaaaatacgaaaaaggatacatatatagctataaataactatttaatcccttgatgggttgagctaactttgtccgcaaattcaattcttcaccatacaactaaaaagagattatgatattcaatcaaacagagaaacaggaaaaagagtatttacagcaagtcataaccactatccatgatacgatcaacaccaccagtacttccgtcaaagagtatatagacaccctgcaggagtacaaagattatctatggtcgaacaaagatatcgatccgcacgaaatccgttccatgcgcgaaagcatattaaatcattttgcattaggtgaaaatgtaattgacaaacgtaggcgactaagcaaaatactggatatcccctatttcggacgaatcgactttcaggaaaagaaagacaaaagccaagttagtccgatctatataggaatacatactttctatgacctcaatcaaaaaaagaatctgatttacgattggcgagctcctatttcaagcatgttctacgatcatgaattaggcgaggcgttctactcctccccggcaggcaaaattaacgggacgatctcactcaaacgccaatatcgtattcgcaaaggaaaaatggagtacatgattgaaagttccgtaactgttcatgacgatattctgcaaaaagaactatgttccaatgccgacaataaaatgaaaaatatcgtcacgacaattcagagggaacagaatcagatcatccgtaatgaaaacgcttctgtacttattatacaaggtgttgccggttcaggaaaaacctctatcgccctccatcgtattgcctacctgctttatgcacagaaaggacagatttcttccaaagacatattaatcatctcccccaataaagtatttgccgattacatttctaatgtacttccggaacttggcgaagagaccgttcccgaaaccagcatggggcaaattctgtcggacgtaattgacaacaaatataaacaccagaatttcttcgaacaggtgacggaactattagaaaacccgacacccgactttatcgaacggatacaatacaaagcctccttcgagtttatatcactacttgacaaattcatcctttacatggaaaacaactatttcaaagcaacagacataaaactcaccaaatacatcaccattcctgccgaatttattaacgaacaattcaaacgattccaccgctatcccatacgtcaacgatttgagactatgacagattacatcctggaaatgatgcaactacaatataatctcacagttagcactccggagaaaaaccaactaaagaaagagataaaaaagatgttcgcgggaaataacgctctccaaatctataaagacttttttgagtggatcggaaaaccggagatgttcaagacacgctaagtccgcatactagagtatgcggacttagcccctttggcttatctgcatatcgcattaaatgggaataacgcccaatcttacgtcaaacaccttctgatagacgaaatgcaagactattctcccatacaatacaaagtgattcaaaaactttatccgtgtcgaaaaacaattcttggagacacttcccaatccgtcaatccttatggttcttccactgccgatatgattcagaaagcatttgcaacaggagaaataatgaaactttgcaaaagctatcgttctacttttgagatcaccagttttgcacaaaaaattcaaccgaacaatgaattagaaccgattatgagacatggggaacaccccaagattcttccattcaaaaatacagaagaagagatccaaggtattgcggatttagtaaactccttcaggaactcccattatacctcattagggattatctgcaaaacagaatcccaagcaaaagaacttgttcaaaagttccagatatatgcaaacgacatctcacttttgtccaatcaaagttctgcttatgtaaaagggattatcatcacttccgcccatatggcgaaaggactggaatttgacgaagtaatcattccgcaaacagatgataagaactatcattccaatattgataaaagtatgctttatgtggcaaccacaagggctatgcacaagttaactttgccttattctgtttcttcacccagttgtcggttcctgtaatagaatataacatcgaaaattaaaagaactacccgcaaaacaagagccgcttgaacaatctcaaacggctccgtaactcctttaacaacatggttatcgagctaatacaaccaccggtctatattccttttttctgcactgaactccactccaactttaaccaactcacgcccgtctacctgataaggtatcagatagcctttttcatcaatctgctgcaaagcctgttcggcagtaccattcagtttaaattcaaatacataaatatacttcggagttttcaccactgcatccgcccgtccgcgggcactacgaacctctgctccggtaaattgccccatcagtttgaaaactaaataaaatacaacctgatagtgtcgttcggtcttttcattcagttcataagggaaatctgcgaagaaagcctgtaagcgggtaagaaaagcatcaacatcaccactctccaattcacgtacaaatttaccaagataaaaaccccgttcatcatctaccactgatgtgtaataaggaaccaaaaaatccataaatccatatcgtacttcatcattgggaaatttcagcaggtagtttccaaaacgcttgtcatacccctttatagtcaaatagccactctgataaatcaacggaatcggattattagcatctaccctatattccataaacgaagaagcattggcttctaccccatcaatcaacgtacgcaaatcatactcactctttttaagcagttcgactaaaaaagtaggagtaccggtttggaaccaataattactaaacttatacccgtcaaaaacgttaagcacactgaatggattgaatactccttccgcaaactcacaaaaatgataaccgtcatataaagccgtcatcttgttcaatgtttcttcataagtcagttcattcgtttctgccaatcgattcagttcaggaataaaagtatcctccaattcttgtcgcgtaataccacaaatcgtggcatactgcggcttcatactgatatcattcagttgattcaaatcactgaacacactgacttgcgcaaacttagtcacaccggtaaggaaaacaaaacgaagataacggtcagaacttttcagtacaccatagaaggccttcaatgtcttacgatagtcatcaagcaaagcgtcatcacccaatgcctgcaacaaaggtttatcatattcatccaccaagactacgactccacgaccagactgttcacaggctcggcgaattacacccgcaaaacgtccggagagagtttcctcatcctctcctttgccatatttcagttcccattgcgtcaactgcctgctaagaatttcgactaaagcctggggagaatcatatttttccgcgtttaaatccaaatgaaatagcggatatgtcttccattccttttccatatcagctatggccaacccttcaaataattctttcttaccttcgaaataagcttcaaaagtagaaagaagaagactcttgccaaaacgacgaggacgacttaaaaaataaggagtctccgttgaagcaattctccatacaagagcagtcttatccacataaagataatctccttcacgaagtttctcaaaagtctgtattccaataggaagtttacgtaatatcccgtccatgatttttcctctattttgattattcaaagatacgcatttccatgggaatacacatacaaactccacaaaaaagtacacagtttcacagacagcactaccatgactccatttttcatcaaaactaactttgtaccagacaaacaacatctcacttcctcttcactttgcaaatccaacacacgataactaaaaccagcaaaataattccataccaataccaacctccggttgtcctattagtagttttctcaactcccgttttatgaatctctgtcttagcactcatatccgacaagctcacagactgtgaattcacttcttgaagaagttgtttctcattaacgtttttcctatccaccacagtcttcaccaccatcccaaccttcaatccaagcgtatccacaggaaacacaaacaacacctgctcgatatgctcccccaccacctccgaatccttttctgaagcaaccttatttttaacaagacttttcccggagctactatttaaacttaaatcaaccctaacttcactctccctgtttatcacctctttcttactcctacatcccgacagcaatacaggcacaaccaaagccaccaacaacacaaacagtaactccctcccactcctcaaaaactccttcacatcaaaacagggacaagccttcacatattcataaggttcaatcactccgtcaccattcaagtccggtgaagtatcccgatgtcccaacacttggagaatattatattcccgctgtaaatccataataatctgataaagcacccgtttttgagcattcgttcgggtatctgccggacgcccgttctcatccaatccgccgatataacatatcccgatactctgctcattccaacctttacaatgagcaccggccaaagcgacatcccgccccttttccaatttcccatccaaacggatcacatagtgatacccgataccgttgaacccacgttcccggtgccaacggtcaatatctgtggcagtaaaatcctgtccggctttcgtagccgaacaatgcactatgatagaatctatatttctcatgataattcattattagttcaaatgtacctgttaataatccgaaggcggcatacgcttcacacaccctctaatctcacacttcttcacttccgactccttctgtatcaactccacttcatgacatttatgtatccagtttatcttttcttcctgctccttgcgaagttcaatataaagcccgtctatcttctcgtcacgttgagtcagccgttcttccagccagtccacctttttacggcgattttcttcttccatactgttcacggacgcttcctctttccgtgcatccgtcttgcggcaagtgatatacctcactaaccatttcacagcttccaaaccacccatagcggtaataaaagcaaggattgtagttatttgcatatttatatttttacgtagttataaagaaagaatgaggccgaagccccattccatacaaaccagacagttctcaacggctcatgaatcaagcagccggatccggtgcttcactattaccacccgaaccaccatccggatccggagtttcacccccatcatccgaaccgtcaccaacactacccaaatcattaatatgatccaaatccttgaacttcaatccatccgaacgggtagtcgtcccggtaaacagacgaatgtccgagttagcacgaaaacagatacgaagccctgaaatattagcgatcgtaaaatcttccgccttctccgtccctttgctttgggcagaaaggtaaaaatatcccagaccggcgatattcaccgaacggccacccagcaatgtctttctcaataacgtacggaaatccttcaatacactaatcgtttcaccctcgctgacaccggaagcagacgcaatctcctttgcaaactcatccaacgttgcactcgtatcatactgataagaaatcaccggatacactttctttcctgcttctttatttgtagggtcacacaggcgagacacccttctaaatctaatagccatactacttttctttttttaatgaatactgttttaattatcacttcgctaacgttaacgatgcaaagatgcagcatcttccacggagatgaaacgacacctaatagcctcatcagaaaagtactaaaaagcatttcagacatacgcaaccgacataaaggaactaaataaacgacaaaaagcaaggaaaaagcgacaaaaccgatagccgggggagaataataaacaaacaaatatattcaaactaataaataccatactaaaaagcatggaaagttttaggcgctcaaggctgtcaatagccagataccgtatattgaaagagagcaaactgcaattatgccggtatatcgaaagcaatgaaaaccaagaattgccgagattgttgcgagatgattcgggcaagattgtctgatatatgttaatatttcatggtaaataagcatttccctgtacaaatgcactacaatcacgaataaatgtagtatatttgtactaaaataaagagtataggcatggaaagcaagagatataataacagttttacttcctctagtattgtaaaggaagaaggtcggacagcctattataagctgctggacagtgtgcgtgacggagacgcggtacgcatcaaacggggcgtatatgccacagccgagcagttggcggacacgatgatagatgtggaagccatcattccaggcggtgtgctgtgccttttctccgcatggaatgtgcatgggctcaccacctcattgcctcaggcataccatgtggcggtaaaaagaggtcgcaaaatcacgcttccaacatttcccaagatagagctccatcatatcacagacacgatgtttgacataggtgtcgaggaactggttgcaagcggttaccacatacatatatataataaagagcgatgcgtgtgcgatgcagtgaagtaccgcaacaagataggcatggatgtttgttccgaagtggtgaataactacatttcccagccagacagaaatctatccctgctgatggattatgccgacaaactaagagtaaaacgaatcctcgaacagtatattgcaataaaactatgagtgaaatcaaaaatcctggaaagtccatccgggcaaagctgctcaatgtagccaagcagaaggatgtgttctaccagaccattctgaccagatattttcaggaacgcctattgtaccgtgtctcacaaactcattaccgtgagaacttctacctgaaaggtggagcactgatgtatgcatacgaacgctttgctgcacgtccgacattggatattgattttcttggcacgcatatcagcaatgatggcgaacgcatcgccgaggcgttccgtgaaatatgcgctgtagagtgtgaggaagacggagtaaggtttgctgccgacaagattgcagcacagaacatcaccgagttcaaagactaccacggtatccgtctaagtattccggcgacaatggacaccattgcccaagtgctgacaatggacattggttttggagatgtggtaacaccacatcctgtatcattagattacccattgttattggaagaactgccagaagcaaacattcttgcctattccactgaaaccgtaattgcggagaagatgcacgccatcatagacttagctgaccaaagcagccggatgaaagactattatgacatctaccacctgctcacatcattcaaatatgacaataccatattacaggatgctatcaaccgcactttcgagaatcgtcatactctttataatgcagatacgatgttcttcaggaaagactttcccaaccatccgcagatgcagttacgatggtcagcatttctaaaaaaggcaactatcaaaaatagcctttcattctccgaggtggcacattggctgcaagaggctttaatgccatattgggaagcctatggacgtatgtaatacttccgaccattaatacattatacaaaaagagtgcaccttcttccccaccgggaaaaagatgcaccacacaaacaaaacaaacaatagagcgaccttcacaggcagcgtagaacccatgattccatttttcctatgctactattataaaaagaaaaatggcaggggcacggattctcttggggaaatgaggcgcttcacagcgacataaaggatataggccattaaactcatttattatactatatgggaaaaacctacatctttttctattctcacaaaaacatgaaatgaaacaattaatttccttttattattttccagactggcactgctaccaccgcaccgacaatcggagccacaataaacagccagagctggctgatagcctccatacctgcaaacaatgccgggccaatgctacgggcaggattaaccgatgtccccgtaacgggaatacatacaatatgcaccaggaccagagtcaatccgatagccagcccggcaaaatgaggactgctattatcccggtcggtagtgcccagtacagtcaatacaaagatgaacgtaaacaccgcttcggccacaaatgcagccagcaaatacggctcttcaaaaccgttggctcccgtaccttctatccccattgtgccggtaatcaaccacagcaatgcagagccaagtattccgcccgtcacttgcgctacgatatacacaccggcttccataaccgacagtccgccattcagccaaacaccgatagtgatggccggattgatatgacagcccgaaacagggtcgattgtgtacgccattgccaccaccgacaaaccgaacgcgaaagcaatcgtcaacacagcggctaccgatgtcgcaccgccattcaatacagcagcaccgcatcccattaagacaagcaccatagtgcccaccatttcagctataaatttcgttttcataatctactttttctactcgtataagatatactattctctctaatcatcctcccattccgaaggcggcaacgacttcttcccataccatttcatccaagcacgagatttccgctttctcaaataaagcgcatcgctacaatgctccaacgcttcccagtcaaatgaagaatggtgtccgaaccacctctccagccagtaaagcagatgataactcatgaacgcaagcaacatccaccaccacgaaagccagacggatagcaccaatgcaggcaataatgccaagaagaaacattccgtatactgccgcgcatgaatctgaagttccatctcctcccacccttccaaatatttgaaccgggtgaaacaacatccgaaaatcataaaataatgccttttcttcctgttcaggaaagttttcgccaacagactattatatattatcatatcctcctcttcattcaaaaaaacaacattgcaaagggccgtccaactaccggccgacaagcccaccttgtaacgacaaagcactttcagtcccgacgtagaagaaaacgagacagtcccgcaatgttgcctgaaataccttgaaatgaaataaaactattattcgacgattacgacgcggttcaattcaggttcactgaaacggttgttcgtatcgccctccgctttcttcacgagacgttcaggggaaattttatacttttcgactaataaattgtacacatattccatacgttgttcactcaaacgctggttcagttccttgctgcccgtagcgctgtctgccgaaccaatcagcgtgaaagtcttgttcttatccgccttgatggcgttgttcacataaaactcaagattggtaagttccttcttgtccagggtagctttgccgatattgaagaacagggctaccggcgaagcagtcactttcgattcattcaccacttccggtttccgacttctggcagcttccagttcggcggcaaggcgctgtgcttcggtgctcaaatcatgatttttggcgcgaagcgcgttgatacgttcattataagatgaataatctgcaggagccactttctcgacacgattgaaacgggtcttgcccaacttcacgcttagacccagtgtcaccgaactcataccttcacctttgctgccacttacagttccgtcaaaacactctttcactagcatttgccgtccttccagagtcaggtccagacgcttgcccaggcggaacgtattcaagataccgatgttggcggcaatttcattgtcatgcgtactgtttccccacgaacgtgcccaaccgaaacctacaaacggaatcacattccacacacgtttctcattgaatccgaggaaaccgttcgaccagttccacataaagtccgcatggagattggaaacattgaactcttccttgtaataaccacgatgcgcccctttggcatacatcccgcttgcgtccgtcagccccttggctttcagacccgaatattgcagacgcactccgtaagaaggagttatccacttgcccaacgaaacatctaatgcaggagcaatacggttgcccaccgatgtcttgttatcaaattcaccttcatagatattgataccaccgcctacaccgatataccagttactccagaaaccattcgtttcatacgggccacggagaatatttctgtccgtgtcacgattttccttttgctgtgccataacacagactgatgataataccaatgcaactgtaataattttctttttcatgtttcaatttttatgttcaacatttagtttaacctgtttctttactctaatttcattttacttccgggacggaatttcacttgtcgctttgccggaatcagcattgagccgcctgtggcaggattatgcccgttgcgtgctttccgtccctgaatgacaaaacttccgaaaccgactaaggtaacaccctctcctttatgcattgtttccgcaatggcttccattattgcatctactgcattcgtagcttcgttaaagctcaacttacgtttaagggctacttctttgattagttctgatttgttcataagtttatattaagaatgattttatatgtttattcatcacggacacagcggatagaaccagccgtagcacgatcatcccaaccatcaccacctccgaatccatagtccgctactataggattttttataaatagcgataatgtcaatactgaattattaccattcctcctacctttagtaccagttccacttgtatgtcctgtatagaagaatggctttaaccctttgaattcaattcttccataacgatgtgaaccggatataaaatagactgaatgatctccattttttccataatgaaaataagctccatattctgtagctaaaagaggataaaaatcttctttttgaatataagcgttagtctgattattgtattctcccacatattctataacaggattcttcaaaaacgccccataaacatcttgcgggggaactttatatccagcagggcacggatcataaattgttttcatgatttttcctatgtttaccatatgatgtacggaatatggatttccccataaatactgattccctgcaggttctggctcattataataaagccagtcattatcactattctcaacattttcattcatcataataaactcttccggatgctttatcgcatattctattgtacctacattttctgttttatttacttccttaaaattcaaatcagatcctcgtatatcatagataggagcattttcaatacttccaagggaagcaggcccaataaaaggatctttacgtccccattgataacctaagccacatgtagtcaatatatctggtatcgttgttgttgctcctaaatcccgatccattattttatagttttttccactataagtttctccattagtaggtaaccccagttcaataatatcaggtttctccgtacaccagacatgccaactccaaagcacatttgcatcttccgcgttcggatctgatttatcataaactgcaatgaccccatttcctgcaccgttactcaaaaattcaacccgattagtagtagcattaaatgcaacttgtgaaatcagatttttcacatcttgccaaatcaactttgcagaaagaggagttattctaacatttttagaatttgaaatatcgttccctaaagcatccttaaaatgatacacttctgcatcatcacctataatctgccccttatctaaacgtccttgttcatcataaatataaccgaatgtatatattcttgtttctcctactataccatccgtcccgtttcctatcaccgtagcatcaaacgaataaagaccataagtcaccggagtaataaagcaatttgccggaccgtcttcatccacagcaatcgcttcagaatgaggtatgatactaaaagggatatacttcacaatattacctatggttatctccaaatatccttcctttagtgaagaatctcctggtacattgcaataaatccaatatacattactaccttgtggaagattcgcctcatttatcggaagtccatcttctccctttacctgcatcaagttcttattatctacgctataaaacagacacacatcagatgaagagaccaaagtttccttgtcagaatttaaaatacgaactttacgggtagtgacattatttaaatcaacattccctgtctcatcagcctgcaattcaaattttaccattgttaccgggtctgtgatgccattctctatcaacttaaggtcttccctatccgtttttaccaagtactggccgttagaagcatatccccgcgaccaattatccgaaaccgtcaccgtatactcgatattacttcccggattttgaatggcttccagttccgtatcatatcccttattctttagctcggcaatagtaaagcgataagaatgattacgtattatatccagatactgcccggtttccttatccaggaaatccaaacgataatactctttattcgaaccgtccggattccggactacaagaagcaacattgcacgatctttggagaatgttttcttatcaaccttatttcctaaagcgtaaatggagtgtccatattccaaaggatagtaacttgtcaccaatcctttcgttacatccaaaggagttgtagcggaaagtaaatcatgcttttctgaactgccgctttcgttgatactgccctgatagattcctcccttatactcgctatctaacgtaaaatccgaataattcagatttctccattcccaatagacttgtttaccggaaaacaaatccgtctcggcatctactgtaacctttgccaaacaacgggtcaataggcaaacattagagctagccttttcattccattctatccaaccgtacatcggaatagtccgcccttcactttgcagaccggaaaagcccttcatcattccttgactagtataattcctcaactgctcttcactagccgttttatttataagaaaatcacctgctcctgatgcagaagaacgattagtcaggttacaaactacataaattcgttctttgtcagcgggaatgtattctttcaatgtcacagtcggcgatgcggttccatttccaaacaaaaaggacaaatcagctttaccctcctgataatatacaggggatgaggcgtgagaatcattgtatacgaacacctgtatgccactaatcttacattccgattcattcgccacactgcgtacctgtaccaattccgcatccgggatagataagctgatgacatttttttgagaggaattaatcatttccatttcagtgtcatcgttacaaccacctaacaacatattaaaagcgaagaaaaccaacagacatatcccgaacaagtattgttgtattgttattttcatttcattcatactttttagatttctaatgaattattcctttacacagcgtatcgaagcaggcgttgaagtaaccaccggattatatatattatattcaaagtccatagcagtatatggatgaaagttaaacatgagcccactatgttctttgtcagcaggatgaggtgaagaacaccagtaaactccccgttttcctaactttataccatcaccattaggtctataagtctccggcaaataaattagcttcgtttcatcaatccctgcattatcataataaaaggttgatccattcgcaaaataactttttatgaaatacatatccccaagtgacgctccggccggggggaatatggcgatctcacctttactcaagattttaaaaacgtcatgcggtgcaactttataaccatacggacaagggtcatacaacgattttaatgtttctttagggaaaacatcctgttctccgtccggatttccccacagatatttcagttctgttgttttcgtacaccaagattcactccccaatcctctccttggactatacaaggaactcggagtacttatagcttgaccggcagtcactcgttcatcggaatatttatatacgacctgaccacttcttacgtcatataaaatagtacgtatgccatcataagtcaatgaacccgaaaacgggtctttacgcccccattgataatgcaatccttgaacagtgcctaaatacgctttagtagcagtcgcaccaagattacgatccatcactttatagttattgcccgtatatatcgaagtgacgaattccagtatctttggggtagccgtacaccaaaggtgccaactccacaacactttcgcatcctccgcattaggattagtcttatcataaacagctatcactgcatttccccggcttcgtcccattttcacctgaaccctgccattgactaaagcaacttgttccaccagttcatccgtgtcctgccaaagcaatttggccgataaaggatgaatattggcaccaccggcttttgtcaagatattgccacttgcgtcttcaaacttcccttcgtcaataataccgtccactccgtttcccattatggtagcagtgaaagaataagaacctgcacctctatctgctatataactattggcagtcccttccgtgtctaacggagtaaaagtatccaatgaactgacaggaatatattccacatgcacattgtcggaagaaatttctataaaaccaccttcataattggcgggaacactaccggtggtacaatagaaattcattacttgtgcggcagtgaggtcataaatgccactgttatccgccagtttatccgtttccgttattccattgcaatataactgtaaatctgttgttgatattaaatctgtcttattaggcttcaaagctctgatttgtaagcgtcccggagcatgacagtccactttcagcagtttcaccgggtcgacaatatctttaatcaaagttatttttgtcctgtctatatcaaagtcaacgcctcctacaatatcacctgtaacgcctacatcttcccaatcgagcatattcgtgaatattttcactttatcaagacttagcaccctcacgtccactgtataaatatgattcctcaatattcgataactatcatttgttttaatgggaataacgcgttcaatcgtgcgattttctccagtttcattattccacaaaggaatcctgactttcaaagctgtaacattcgtattttcatcatagtctgattcattctctaaccagttctcataaatatagcggtcataagacgtctccgctactttatcaacatttaccccgtcatctatcggtaactcaacggatgataataaatgagaattttcccatcgaaaccaccaatcaacattttttaaagtacaatctatatatctgtgatatacgtcattccaccaatcatttgcagcaggattacggtgagtctcaaaaggtgcaaatggacgaatacacaaaggcatatgaagtatttgagtctctacctgatttatattaatattccatgaccctagaacggagcgttttgtagtacgaaccacggttcgtaacttagcgactccacgaagtaaatgtacatcagcctcaaactcacgaccaccgccccacctatctcttattgtccctatcccggacatatataacggagttgtcaattcctcctctgaagtgacatcaatcggatattcttgatttgcccacacataaatattatctccatctctaaatgtaccaacaggcacttcaatacttgccctatatatactatcctcataaacataggaatcaagatatattgttccattctgcgtagaatagaaatttctgtaatggtcgccatcataacaacctatttttacaaacaagtcttttatctcattttctttttctaaagcaatgctgcgtgtattagaacccacaactttagaaaaagacactatgactttaaaagtaagcctctccattccttccggtatgcatgaggtgtctcccttctcatacactgaagtacatgagaatataaaacagcttacaaagcataatattagatatacaatgtactttttcatactatatattatttctgctattcttagtttattctttaacacaacgtatagaacgtccgtctgcccgccaaaacggttgccattcttgtcccaagccataaccatatccccctaaaggataaactgaatttactgaagctacagatgcccaatgcgacaatccagatataagacgaccatcttgaggcagacgtttgtctgatcttggataatagcctgcttctggatgaataataccttgtgtactctcagttgaaccagcttgtaatcccttccaaggttgattgtctgggggaacacgccaacctatcggacatggatcaaatattgttttattatttggcaaccataatgaataattcattaatgacaccgaatttgtataccagtctccccaacttcgctcattagttatataagttagaggttcacgaaccgactctactaagttttccacttcagctactttaaaacggacattggttacactattttccgtataaagtgttttttccttttgagtccaattttcagcactaggaaaaggatctttacgtccccattcatacagtaaaccttttactccaccgtcaattgtatattcattagtcatagctcccagatttctatccatccaaaccaaattattaaaaaacttctgtccttctgttacatttggttcataatctgtacaccaaatatgccaactccaataaatctcgccgtttactttcatcgcaacaaccgcatttccctcttttgccgtccttacctgcaagtaagccctctcgcgctccaaagcattgaccaccgtgattcctccgtccgcaataactccttgttcatcttgccatacgagttctgccattacgtctccatccggaattggaatattgccaaactctacttgttgagcccatatcttatatacgttttcagtaggaatatccacccttccgcccggagctaccatataacaattcgtcatcttaacttctcccttcacctcttctgcctgtggcggaagatattcccatggacacactgtcagatttagtttaaacttagctgttttttgagtaaaacggcaaaaaagtttatatacatggttacgttctattttttctagaatttctccatagagataaccggtataaggatcatatccgcccaactcgacccaagcacaaccatcatatcccgtttcatatctataatggaaatctaaggataatttatcatatatacactccatttccggaacataaaaagaatataataattctcctttatcatcagaatatacttcttctctgatttcttttctgtccataaaatagatattatcgtaacggttatccggcactcggacaggcgatataaatccaatatctgatatacgatccactcctaactcttcaatataaagcctgttttcccagtagttttcatcctgtcctatttccctcctcatataaacatctaccctcgcaacagctcggtctacttgcagattgattgtttgtgtcgtcccttccaatgcgtccactcctgtcagttctccatacatcggcaaacaataatcattatagtagcccattatattaggattccaataatccattatatcacgtctcctgtattgtatttcagccaaatcacccggatgatccactgcttccaataaagcacgggaatccatatccgttggctcatttacaatggcataaaacgttttaccagtagcagcctttactagaaatatcggagtaacgtatacaccatcatttatattcaaatccgaccaataatacatcttatctaaagtagagccatcaaaaacgtaaagacgtaaccggttgatacgcgtttcattttcgttcaatacttcaggatcatatgtagcacgtgtactgatactcatattcattcgcacctttcccggttcatccgacagaactgcacgttgttcctcattcacacatgagaaacaaagcagcacaagccacatcatccatttatattttgtatatctcatatcatttgccgttatagtttacgtttactaaaggtcttcacctttcaaccagatagtccagccgttaatcacaatcttcgtggaaaggaaattcaataattccgggttatagaaaaagacaatcgcatactcgctctgacggtcgaggtactcctgcgccggaatattgtgcccttccatttttgtaagcagcaggtaaggtattaggtcaaccttcatcagttccttactgtccgacatgcgtgtaagcgtcagatatacttttttatgttcgagcaggcgcatggtattcatttccgccacaatgcccacatcttccactttttccaaatgatagggctgataactaatcacgtcgtcatccagcaagtcattattccagtcataatatccgttgtccgcatggatttcgaacaggcaatcactcatatccagttcttctcccggaccggacttttgcaagataaagcggaatttattggtatcctttatcagagagaccatttccgtctgttcctgtctgccggtaaagtcgacagtcttcacctcgccataccaaagcgggttcagagctttattgtgcaccaatgactctttccgtttcattcttaccatcaagtcttccaatgttgatttcccggcaaccagttccggcatttcaaagtcatcgctcactcccgcccaagcggctatccggtattcaccgaccggaagcggcaacggcatacggtagctaccgctgcccaaagtttctccctgctcgctcttcttcatgataaacgtaccttccttgtcaaatacaaacacgtcgacacgattcacttgagccgcaaaagcgtcggaaaactccatgttatagtcataccggaaacgaacatacaactgacattccggtagtgtctcatcaatggatgtgcaggaaaagagtacaagcaataacaacaggcaacttccataattcatccgtcggacagcaccttttgtattcattatctttctcataatctatgggtctatttatttttctagtttcatatatagtgtggaaaagcgacttttgcctttctcggaataatctgctttagttgacaagtcgcgaaacttgcctgtatggtaagacctgtttttatcagttttttatatcaaggtcttgattcacggaaataagcctccgccggctgaacaaaaacgaaaagaggaaaaaaagaaggcgtcacaagacaagctgcgccgtatcataacgccttcttattattttaattgttattttagcccaatatagttatcactacaaatccactccctgactccaggtagtccatggatttatcgtaatacttacagagagatatgcttcagcgtcatcatcattctcacctggtttttcagggtcagtaggatctgtggtatcaggaatccaaggagtacccggttgtttcacgctgttgatagtcaatgtgtaccagttgttacgtacaacaccgtatttgccaagtgccattgtggcggtgattgcatcgtcatgacggatgaggatgttataatagcatacacctttctggaagtattctacacctacggtttcaccggctgttgcatcaggcttggagtattcaccaccgttcgcaatagcgtccagttcggcgagagtaatagcggcaaaatcagcaccgacagttttgccttgtgcagtagcggcagcagacatacgtgcatagaactggtcacaaagagtgattatctgtgtttgcaatgcatccggtgaagtaactgcttttgcagcattatatactgcctgcaaatcagccagtgtcttataagtgacacccaaaaggcggaaccagctatcgcctgctgtaaatgaattaggagtgtaaaccgcacttgctacggcagctgtagtctgtgcctgggtttgtgcgtcggcagccattgtgttctcaagacagtatttgctatccgtcatagctgaaaaatcagcaggcaaagttccgtcgtcagcaactttcagatagttgaactgtgacacattgaatcctgccagttcgtagttcgggtcaattctataatccgcacctgcagaacctccggcgggcattacgatttcagcatacgggaacatgctcttgttggtaacattcaatgcccagttgccgaatgtacaagtcactcctgcaggaaccttgacgccgtccggatttgttcctaaagaaaccttggctacgacacggtctacatgaataagtgaacggtcagcttcggcagcggcaatcgcggcagtagcgtcagcaatagacgttccatcaaccaccttcacattagctgtcaccagtgctccgttagccggatttgcattgtcgccggcattaatcatcataaagttgtcctttgttgctccaatcacttcgtcaagtgtctgctctaccgcaccgttaatgacagaccaggaagcggaagccacacaggcagctttgaacttgtcgctcggattgactactgccagtactttggcggtagtagaaggaactttgaatgcatttccggtccctgctgcaggattaccgcctacattcaaaatatactcggtcgaagccaatgtctttgtctccaaacaaacgtctgatgcatcaaacaatgcaaggagtacttcgtttacattctgttcgtccgctgttccgtgattttctccaggagcgcgtgtttccgtacttttaggcatatctacaactacggacatataagcctccctgccgtctatcggcaacaggtcttgtccgccggttgccatctcttcatcattactacatgctgccatcgccagtccgacaaacagcgttaaaaaagatttgtccaatttcattgttttaaaatttaatgaatactaaaatgttaattactaagtataagtttcagattatattattcagcttttataccttccaaacgtttcaggtacacccgcatcgcgtcgtaatctcccatttcccaagccacgatagcggcgttattgttagctatcctgtcactcggaaaacggtcggcaatcatccggataatcctgttgtattcgtccgaacctttgccgtagctgactgcgacctgatacatttcgttatggttcatcttatcgggacgtgttctgatgatttcccgtccctgctctacagagaacggaaccactgtatagctgactgtatattccactaagcgcagcttcggatatacctcttgcaataaggcattatatatttttccgccatcgatagcttttatcttcgcatcgcgcgcatccggttcgggagtctgcccgataatatcgagtactttctgcatataggaaggacggtattcgcacaaccatgcagctagtccctcccagttttccggcaccaaacggcattctatcatactgtcgtccagcttataggcatgtttcaggttttgtaccaacgctttcgcacgttgttcggaaaggcgggcattgccgtcataattgccttccggcgatgagtagcccactatcttaatccgggcaatacgatagttatcatcttcacggatagaatcaatggacgaatggattttagccagttcggtaggattattcatataatcggcaagcaatgccgactggttcactttaaaattaagatatgcactgcgggtgaaagaacgacgtttctcctctgcctgtgccaccattatttccagattcgggcgttccactacctctttgaataaaggaagctccgcaacgggagcattacccagtgcttctccgcaacctgcgcatccctgtaattcacggaatatctcgacacgtgctccggacatccactcctgtgccggaactgtttcgttatattctaacaacatatcccgtttcctgttaaaacgaatcatttcctgtccctctcccgcagccggttctttgccatacagactttctttccgcttgttcatgcgataacggtttctgcctgcaatgcaaactgaaggcagggcgagtgtatcgctttccgaccggctgattatcaaaggagtgattatcatctgtcggcgtgaagggagccgcagcgtgctgcaatccatattaaatgagacttccactttgtcatcgcttattttccgggcaacggcttgtccgatatttatctcttgggcatgggcggaaactgcgcctagcagtcccaaggtcacgtatatacagattcttttcatcattagcctattttataatgtatatgatactcactgcagcttttgttgggccgaagtagtttttcttctcacttttctgaatggttccacatgtggcacaaggatatttggaatgatccaaccgcgcatagccgactccaagcacagcctccatactccagcggttgccgagcagccactggtagccgtaggatattccgccgccccacaaatgtccctgatagcggtggcgctccatgttatcactcaaaaatgacattccgcccacattgtatttggcgtaatgtccgtgcagagccagaaaatggccgttgaatttctcacaaagccagtagcgaagttccggctgcacgccccagtggcgcaggcgcgtttcatcatcaaacttccaggggttataatttccggataagtcgagagaccatttcttgcccaggcctatttccagccccaggttcattgtagtagtagcgtcataaagcaaattggtctttaccgcaaccttttgggcataagagttggccgtattgcaaaggagtactcccaagacaccgattaaacatagatatttcttcatgtcatcttattatttattgttgcttttcttgcatctctattctgtaatagagataaaacaaaagaatacaaacaataaaaacctaattaccaatgatttatatcacataaagcacccatataacgtttcagtatcatgataaaatgaatcatagcaaacaaaacagaaaataatattctgatatataattcattaaaaatacagatactgaaacaattgtgaaacaaacagataggtaacagaccaaacaatcaaaacagttattgccatggaaacaaaacttatgaaaagcgaattgctgtacatcgaagaacacctgtcatgccaaaactacatgacaacgattgaaaccggattcaagtatttggagttcgataagaacacagaatttgaggaagacactacaagtaagaattatcttctattcttcctgaaaggtgatttcaccataacttgcaaccagttccacaacagatcgtttcatgccggagagatgatactcatcccccgttcttcccggctgaagggaattggagaaaacggttcaagcctgctctccatgtttttcgatatgcccgaaggaaactgtgacaagctcatattgcaatctttatcagagctatgcaacaacattgaatatgacttctcaccgattagaatacactacccactgacaccattcctcgaagtgttaacccactgtatcaagaacgggatgagttgtgcacacctgcacaccctgatgcaacgggaattcttctttctcctgcgcggattttatgagaagcgggagattgcaaccctgcttcaccctatcatcggaaaagaaatagacttcaaggattttgtcatgcgtaaccataccaaagtggataatatagaacagctcatctcactatcgaacctgggaagaagccgcttcttttccaaattcaacgaggtgttcggaatgactgccaaacaatggatgctgaaacaaaagaaccaaaggatactcgaaaaaatgaccgaaccgggagtatgtataaaagacgccgttgaagaattgggatttgattcgcaaagtaacttcaaccgtcactgcaaactatatttcggatgcaccgccaaacagttaatggaacgctgccaaaccgaaaacagccctatttatgaggataaccacgcaacgtgtacaaaatgaataaaaaaatgtactttatgacaatttatattataaaaaaataagcttactttgcagcgtgaaatagttcaaaacaacaaagagattttaatataatctctattacagaatagattacaatatcgcaaagataaataaaaatattatatcttctaattttcaacggattatattacaaattttcatttcacttggataaatttgtaaccatgctgttcacctgattaagcatggatacatcgaaatctttcaaatagacgcgtgtcatttcttccgaagtgtgccctagtccggcactaatcacagaaattggtgctccatagtcacgggcaagggtagcccaggtatggcggccgatataagtaatatttagaaatgcaataaaaaacagaatggtgcgaattaaacgtaaatcgtttataattaagcattttacaagaattgcatgatagtcagacctgcaaaataaaacaaaatattgcagcgtttcagttaccagactgttagccgcctgtttcggaaacaacggcaggtaaccggatttttaccggtagaggcagaacggatttttattcactgtttatcaatgttttgcataccaaagaacgcttttgaaaggagtatttttacaacctaaaaaagagcgtatgaaagtggaaaaattcaaggtattgctctacctgaaaaagagcgagccgggcaagaccggcaaggccccgatcatgggacggatcaccctcaaccgcacgatggcgcagttcagctgcaagctctcctgcacccccgggctgtggaacgcgcgtgagagccggctgaacggcaagagccgggaagcggtggagaccaatgaaaaaatagaaagactgctgcttgccatacactcggccttcaattccctcatggaaagaaaaagggatttcgatgccgctgcggtcagggacatgttccagggcaatgcgggcatgcagatgaccctgctcaaacttctcgaccggcataacggggaaatgaaggcccgtgttggtgtggaccgtgcgcccaccacactctcgacctacctcttcacctaccgcacgctttccgaattcatcaaggcgaaattcaaggttccggaccttgccttcgggcagctcaacgagcagttcatccgcgactaccaggatttcatccttctggaaaagggatatgccgtggacacgcttcgcggctacctggccatcctgaaaaagatctgccgcatcgcctacaaggagggccactcggagaaataccatttctgccacttcaagctgcccaagcagaaggaaagtacgccgagggcattgagccgtgagaatttcgagaaactgcgtgatctggagataccggaaaaacgcaggtcacatattatcaccaaagacctcttcctcttcgcctgttacaccggcaccgcctacgcggatgcggtaagcatcacccgggagaaccttttcactgacgacgggggcagcctctggctgaagtaccgtagaaagaaaaccgactacctcggacgtgtcaagctgcttccggaagccgtcgcgctgattgagaaataccgggacgatacccgcgagactcttttcccaccacaggactaccataccctcagaggaaatatgaaagccctgcgtctgatggcgggactcagccaggaccttgtctaccacatggggaggcactctttcgcctcgctggtcacgctcgaggagggagtaccgatcgagaccatcagcaaaatgctgggacatagcaatgtccggaccacacaaatttacgcccgtgtcagcccgaagcggctgttcgaggacatggacaggttcatcgaggcaacccgtgatttgaaactcattctttaaccctaaaaaatatcattaccatgcgcagtacattcaagctcttattctacatcaaccgtaacaaagtgaaatcggacggcacgaccgccgtcctctgccggatcagcattgacggcaagaagtcagccgttgccaccggcatctattgcaggccggaggactgggacagcaagaagtgtgagatcagaacagtcagggaaaacaaccgcctcgccgccttccgcagccggttggaagaggcgtacgggaacctgctgaggaaccagggagtggtcacggccgaactgctcaaggccaccgtgtcaggtgccaattccgtgccggaatacctcctgcaggccggagaggtggaacgcgaacgtttgagaatccgctcggcagaaatcaactccacctcgacctaccgccagtcgaagaccacgcagctcaatctcagacagttcatcgaatcccgcggaatgaaggacatcgccttttcggacatcaccgaggagttcgccgaatcgttcaaggtctttcttaagaaggagctgggctacaggaacagccacgtgaaccactgtctgtgctggctcaaccggctcatctacatcgccgtggaccgggagatattgagagccaacccgatagaggatgtggcatatgaaaagaaagaaccgttaaagctaaggcacatcagccggggtgagttgaagcggatgatggaaaccccgctgcccgacccgatgatggagcttgcacgcaggacgttcatcttctcctcgctgaccggtctggcctatgcggacacgagagcactccatccccggcacatcggaaagacctcggaaggaagaaaatatatccgcgtctgccgggccaagacggacgtggaggcgttcatcccgctgcatcccatagccgaacagatactggaactttacaacaccacggatgacgacagaccggtattcccgctgccggtccgcgacgtcctctggtacgaggtacatggaatgggcgtggcattgggcatgaaggagaacctgtcctaccacatggcccgccattcgttcggaaccctgatgctgtcctccggcatcccgatagagagcatcgccaagatgatgggccatacgaacatcaacagtacgcaggtctatgcacaggttaccgaccggaagatatccggtgacatggaccagctgatgaaaagaagacagaaaggggatacggtccttctgacggaaatgtccgaataatgaaatgccggccggaaccattaaacattggttccggccggcattcttaaatattgaacgcccccgattatatcagggcctcatgataattatcctccaggagtttctcaatgtcggataccttatacaaaatttttccgcccagccggatataagaaatacgcccctggtccctataatcctgcaggcatctgcggctgattcttagcaggtccgacaactccttgtcagagagaaaacgctcgccgttaaacagggggcggttatcctccgcaagcctttccagcttcgtctggatgttatccagcaggccaaagaaccggcggacactgcccgtctctttgctaataatcccttccatgctacttccgattaattattcattctttcttttttctctcaccgccttttccttgcgtttcatggcgacataggccatcagcttttctacgtcctccggcctgtaatagattttccgctggatttgggtgaatgccagccgtccggtatcccggagagtctgcagggtacgtggagagatgtcaagacgcaggcagacatcctggttgtccattcactcttccggtttcttttccctgttcttttcatacaagcggtccgcctgtgcggacaggctctcagtccgagccagcatctcctcaaagattccggcttcaatgtaatatacttccatttttcttgtttttatttaaaattgcttcctgtcaggaactcaaattattgaaatacagttcaaaatactttccaaaggcacttccggctgggtgtcgtggtttccgactccccctccggagccgttttaaggaggatttcccgtcatattacggctggaacagtttgtaatcccgtcctgtgatcttccttatcacgtcggcgttttccttaatatgttcaaccggtatgcggcttataacaccggaaacagtgaaatccttacgtctgaccgcccagacaatgtctgagatacattcgtacacctgtgcgtcaatatgcaggggcttgcgccggttggatgaaaagttgttcaggagggcttcaatatattttttacctcttcctccgttatcgtctttttactctccggccgggatgaagattccttgtggggtaccacctcttccagatccccggaaatgcagctcaaatatgagcctttggcggcaactatatccagtatctccttctcgttgatatgatacggatttggttttttcctttcaatgctgtccataactatgatttatacattaattccatgtgacaattgggcgttttgtaaggcggacgttcccgatgacggattatcgtcctacgccgcaaagaaaaaaagaataaacgtgggaaagggtaccttgtcagctatagtcatatatagacatgaatagtcaataccggcaaaagacatgacaaacggctgtccggcgggaggtctggattctccccgacgttgccgggattgtgatatatcaggtcatggagatattggcagactgcattatcgggataatgacataccaagttacggatattgtgatagattatgtcgttggagtgtggaagttgccatagggaggctctttcagcaaacggaagtacggaaggtacagatattattgcagccatcatcaacaaagaccggaacatcacattgggagaacggtgcttatctgcgatatgattatcatttcctccagtcattttgtattgaaagaccgggaaaaagtggtgacgggtttgtaactctttatatttgtagctttgctatcgaccagggcaatgaatagtacccgacaatccagttctttatcatatccaataaatgaagaaatagggcggcatatcaacgaatacccacaccggggagtgacgattatcaatacaaccggcttttatacaggacgagaagtaaagatgatgtttatattagccgggaagagggaagcgccggtcagcttccggctgataaaaaatatagacacggaggcttttgtttcacaaagtgccgttataggagtttatggagaaggattcgatcatatcaaagtagaataagaaagaaataaaaaatgataatgatcatcatgaaaagcggcatctgccgtgcttttgttcccgacacaggatgcggtgtgacgcaatggttcgcattcggcggtgaaatggccgcaagcatgtcatgctactatggacagaccgcatcaacgatagagatagaagcggaaacggactgtgagatgtttatcgtggacaaaccgactttggaaaacctatgttccacacaaataatcctaagaaacaatttgtaaaattcgaaacagaaaagtatgaagacaatcattgcagagaaattatcataacttgtgataatttttcggccaaaatactacccgcagggctggagattttttccgaaaacaggaggcttgaccttgctttcccgtccaatcccggagttacctttgcgcccagaacgaaaatgactgcctgatgcggcccactgaaaggcgcgaaaatggaggtaaacggaagtggaggcagattagacaggaaaacttcaaaggagaaatccgtgaaaagaagaaacctaaaaggaaaaggaacattgccggaaacatgaaaccggcaaaccacctgcaaggaagtatggtttatctgtctgtccaaactcgtttggtcgggcggataaatcattcttcccagtttgcctgccgtggggacggcttgtgccattcatgggcaagcggtcatatacagctttccgcttacggctcaaaggaaccgcaaaaagaaaaatccatagaaaacccgtaaaagcacctctatggcataagcataaaagaaatgggtcttgcatcatcagtctaaaccattggttaggcgtgatgcaaagcccttttctccgcttatgcggcagtcggtacacgttcgtacaaacctgtttgggcgatggtgtgccgacggataaaaccgcttttacggaatgtttttatgtttatattagaaatatttcttattataaaaacgcgctaatcattttgtcattcgggttgtttttattaaatttgcagattatagcaatagttatgcaaatgaagcggataaatcgactgaaaatagtgcttgcggaacaaggtaaaacagggaaatggttggcgcatgcattaggtaaaaatgaatcgacagtctctcgttggtgtacaaacgaagttcaaccttcggtagaaacactactgacgattgccgaaacgttaaagattgatattaaagaattactttgttctacgcaaatgtgtaatcaagatgatggcatccaaatataaagcaatcgattttttctgcggaggtggtggaatgacttgcggtttaagacaggcagggattaacgttatagcaggtgtggactttgatcaagatgccaaagaaacgtatgaatacaataattccggaagtgttttcattcaaactaatataaagaatttacggagcaattattttgagcgaaaatttgggatacggaaaaatgatgactttttgattttggtaggatgcagtccctgccaattttacagtataattaatacggataagaataaagccttaaaatctaaggatttattaaaaaactttgctcggttcatcgaatattatagaccgggatatgtattagtggaaaatgttccgggcataatcacaaataaagatagcatcttaccttattttctacgaaaattggaagatctcggatataaaaatcctgtttataaggttgtagatatgagctattacggcgtacctcaaagtcgtcgaagattttctcttatcgcaacacgattggaaaatgtcaatatacatttacctaaggcggacgataaagagaccgtattagccgattatttaggtgaaaggaacggttttcccaaagttagcgcaggccataaagacagtagtgtgtttaaccatacggttgccggattaagtgatgtatgtcttaaacgattggcaaagaccaaacacgacggcgggaacagacttgattgggcaaatgatccggaattgcaattaccttgctttgtaggaaaagacgattgttttaaagatacattcgggcgtatgtggtggcatcgaccggcttcgactattacaactaaattttatagtatctcaaacggacgtttcggacatccggaagaagatcgggctctttctttacgggaaggtgctacattgcaaacattcccgaaaacctatgtgtttaaaacaaatagtattgccgcaacggcaaaattaatcggcaatgcagttccgtgtgaatatgctcggcgattaggtgaaacgataaaagcactggaaaacaatggcacaatttaaaactcgggcaagagctctcgacttattgggacggcaacaaattgccggtatccctacagctattaacgagcttataaaaaatgcacatgatgcgtatgcggataaattcgatatcgattttctccgatgtaataatctgctggtattacgtgatgacgggctcggtatgacaaaagaggaatttgaaactcgttggcttacgctcgggaccgaaagtaaattggcaaataaaaaaagcagtttaccgcctattgacatatcaaagccaagacgtcctatcatgggagaaaaaggcataggaagattggctattgcatcaataggaagtcaggttttaatcgtatcgaaagcaaaattaagatctaaagaatatgatattgttgtggctttcattaattgggagatattcgagttgccggggattaacttggaggatattgttattccggtaagagaatactctcatatgccgaatgcagccgatattgacagtattaaaaatgaagtaatacaatcccttgataaattaaatcaaaaagaacttattgacgacaaggattttgaaaaaataaaaagttctatcacgtcttttaaagttgacccacaccaactttctttacaactacaacaaggatttgaattaaccaatggctgtggtggaactcaatttttcatctccccagtttacgatacgattatttccgatatagagggagacggcaattcggacgaagctacaaaaatcgagaaaatgttgatgggatttcacaatacaatgacccccgatcatcctactcccgtcgttgacatttcatttagagactatagggcgaatgacggtagttttgtcagcatcatagataaagaacacttttttaccacggaagaatttgaattggcggatcaccattttcaagggcaatttgatgagttcggacaattcaagggattagtaaaaatatatggagaaaaaacatttgatcacattgtaaattggcgggataactattatagagaaaccgaatgtggtccgtttaaaattaacttggcgtatttacaaggagaattgaaaagttctcgtgtagatgtcgaaaattatgccaggattaaagccaaaggagataaattcggaggtttatacatatatagagataatattcgagttctaccgtatggtgactccgattatgattttctggatattgaaaaaaatcgttcgaaacgagcatcaacatatttcttttcttatcgacgaatgttcggtgctattgaaatagcggaccgagaacacagcggtttggtagagaaagccggacgcgaaggttttattgaaaataaagcatatcgccaacttcaagcgattttaaaaaatttctttgtacaacttgccgctgattttttcagcgaaaaaaacaaaacggcacaatcggaattcttcaatcagaagaaagacgagttcaatgcgtaccataacgcacttgaacgtcgggataaattggccaaatcgaaaaaggagagatttgctcgtgagctcgatatcttttttgccggtttaacggaacataaattcgaaaacgaactggaagaattacttacgaattttaggaacgatttacattcggttttatacattaacgatgcggatgaagcaagccagaagataatagatctggaatttgccatgagacaaaaagtttccgattacagaaaaagaatatcggtgacaagtcctaaaggatttgcaatgtcaaaatcaatgagaacggattttgacacgtaccttaatgagtttaaaattctggaacaaacggtatttaaaaatatcaatgaaaatatcgatcagctaatcgatgattatacggcacagttgaatctggaaataagtaagcgaaagcggttggagcaagcggtggaactgatttcagccgaagctctgtcacttaataagaagaagaaaagcgaaaccaatgatgttgtttccgatgtttctcgcaaaattaaggatcttacgaatgaactgataatcgatttggataatcaaatacgaagcgtaaagaatcaattcaaattattggcaaccgataaagccgataactttgatttggtaacggaacgcaagagaatggaagcagaaatagaatccataagcagtcgaaatacggatgttatggaacgcataattcgacaatttgaaagtttctatgtcgaaaaaaacgaagacggtcaaataattacaaatgaccaaatagcggaagccgcttcggaagagttagaggaattgcgggaacgattgcaatcggacgttgaattaagccaattaggattggctgtcggaatattgcaccatgaattcaacggtacggttaattcgattcgacatagtctgaaagatttaaaagcatggtcggatgtagatatcaaattggaaggaatatataaaaacatcaaggtaaatttcgaacatttggacggctatttaaatttgtttaccccgttaaatcgacgattgaatcgacgtcgggaagacatatctttattggatattaaaacatttttaatagatttgttcaaatcccgtcttgaacgacacaatatagcttttaaacatactaacgggtttgcaggtcgaaaaatacacggatttcgttctacattctatcctgtatttgtgaatatcattgataatgccatttattggttaaaacaaagtgatgttcctgaaaaagttattcggttgcatgcggatgatacgggaatatacatttccaataacggtattgaaataaaaccccaagataaggaacgaatctttgaattaagattttccagaaagcccaatggaagaggattggggttgagtatcagtaaagaggttttgaatgcagagaactatgatatatttgtggcacaacctaaggaaggctctacagttacttttaaaattcaaaaaatgcaataaaaatatggcagacagatttattgagcaatcgaaagaaattgcaaacaactttatacaaaatattgtttttattgatgacaaagcatataagaatgatatgactaacaatgcatttagcgcattagatgtatcgaatgtatttgcacaatctggaaaaatctgtgctgtatatgcacccaaatccatttctgatgttaatagttacaatactatactaaataaagcagatgttgtcattttagattggtatttagatatagaaaaggaggagaaccaagttgaagatcccgatgcagatgcagataatgacgatccgcgcggagagtttacattaaaattgatatctgatttattatcacaaactgggatgttgaaactgttaattgtgtatactggagaaacggatttatttgaaattacgaacagtatatatcagaaagtggatcagcattcttttcataaaggagattgcgttattcaatctttaaattctaagatattagttagagctaaaaaacaaaattcggaaactcaatttgcacataatccggaattgaaagataaaatagtatcgtatgaaagccttccgactttgattgttgaagaatttgcagacatgaccaacggtttgttatcgaattttgctttatcttcaatatcggcaataaggaataatacatccagaatgttaagcgtcttttctcccaaattagatccggcatatctcgggcacaaaatattattggaaaacacattcgaatccaagcaactattaataaaattatttggcgaagctatttcggaattattggagacaacagatattgatacaaaggattgggttgataactggattgaaaaccgtattacagacgaaacgataagtataaatggagtgtctattggcaaatcgaaagaccttttaaaaaaaatgtttagttccgagcaacctcgacttaaagataaatatacagaagcttcaggaaaagatatgtcaaataaagacgaggggaaattacaatcgcataccatagagttatttgcatatgatggtatcgatgtgaataaatcgaatgtagattttgccattttgacgcatcataaaaatatatttcaacctgctattggggctccgatattaacacttggaacagttataaaatctgtagacaagtattatgtttgtattcaacaaagatgcgattcggtgagaattaaggaggaaagacgattcttatttttacctttagaagaaaaaggcgaatatccgttaattgtgaataatgaattgaaattatttccaaataaatcttcatttgcaataaaaacagtgaaattcaagccaaaagaaggtgctacaattattcaagcatcaaaaaaggaggacaaatatgtattctattcttcctatggagaaacttatgagtgggtggtagacttaaaagaaatgcaagcacaacgtattttaaacagttactgtgcacaactgtctcgcgtaggattgaatgaatccgaatggttaagacttatcgcaaagcaataatataggctatgtcagatattttttctcaaactaaaagatcggatataatgtcaaaaatatcaagtaaagacactaaaccggaaattttagttcgtaagttcttattttcaaaaggattcagatatcgtattaatgtcaaaacattgccgggtaaacctgatatagttttgcctaaatataaaacaataatatttgtgaacggatgtttttggcatgggcataattgcaaaaagggaaaattaccatcctcaaatacagatttctggaaggaaaaaatatcaaacaacaaatcgcgagatgccaaaaattccgatttacttgtaaaactcggctggaaagttataattatatggcaatgtgaaattagtaagattgataataggacaaaaatacttaataagctactggaggatattaaacaataataatcacgagatattaaatctaaaatataaatgcattaatcgggaaaatatagaaaaacttattctataattccgatttttgtcttatcgttgcgtttgaagagttctttgaaggttacgcaacgtacagaaaaataatgcagcagataactaacttaatcgtaacctattactattatgagtaataaacttatgctcatttccaacaaattacactcttttcgtaacttcttaccacggctttttcatttaagaaatattgttcatcgcttgtaattgtagtaaaaatgcttatattcgtgcacagcgatgcggaagcaccgccttaggtgtttcttcttatcgttcatttttattttttttataggcggaattcaatagaatatgatgttgatattgtcttccgcctttgtttttgcaatagcaaaaatacgatttatttcgttgatatacaactttttatacgcaatattactaaaaaagaaacaccttgactgtcttcgtggcagcatcatgactcatttgagaaaatttgtatcctcagtccctgaataccgcagaacaagcagaggaaacttcaaacacaaacttgaagatatactcatgctcgtaatattgggcagactcagcaagtgtattaccagagctgaaatacttcaatttggcaaacgtcacttgaaacgcctgcagtcgaaagggttatttccgtatgggttaccctcagaagctacgctctgccgtgtgtttcaaagcatcgacgatgaaaagatggctgatcgaatgtctgcttttgcagaggttttccgcaaggaaatatccgcttcggcaactgacatcatttgtattgttggcaaggccatgcgaggtaccttgtacgacaacggacgcaaccctaatatcgtctctgcatattcactccgttccagctttactttggctactgatgtttgcaaagagaaaagtaatgaaatcaaatccgtgccccgactattggataaactagatgtgtcaggatgtgtcgtcacagcagatgccatgtcatgccaaaaggggataatagacaagattagaggtaaaggaggcgacttcgtgatcgaactcaaggcgaatcaaagatctttgcgctatgggcttgaagactctataaaagccaccaccccaactgatatctacaaggaaggtccatacttggaacacggcaggattgagtcaagggtatgccgtatattccgtggggaagaactgattgccgacagggagaaatggaatggaaatttgacagttatagaaatactcacatctacggagaaaaagtctgatggcagaagtacgtctgaacagcgactgtatatttcaagcctggatagcagtgcagagcggcttagtcagataaccaaacagcattgggctattgaaagcatgcactgggatcttgaccgcaacctccgccaggacagcataaagcgtaaggctgaacgagcggctaggaacctggatacaattcaaaggatggtgttggcactgattgccgtttggaagaacagaaggaaaaaaatatcagataagcaaaagggaacggcgcagataataagggagctggcggtaagcttcactaacgtgttgcattttctggctcaaaaatgagaaaaattcagatttgatatattcgtaacgcattgattaccaataatggtatttccgcccatgccgcattggcatgggtatgggaatggtacgcccaattcaaagcttaaatgaaaaagccgtgacttcttacgactacagacaaaaatacaaataaaaatacaacggcttgtcaaattggataaaaaacgtctatatcgcaaatcttaattccctgtatcgcaaagacaacattaacttattcttctgattatcaatcataataatattcaaaatagatactctacatttttctttttggggatcttcttcaaatttggcggtatccccctcctgatccgcttctcttttggggatataatgatactagataacaggcggaacacctttaaatcccctgtcatgtattatattatcatggatagccagtttttgttatcgcggaggggcggtgaaaagaaaaaatgattgcggaaggaggccgtgaaaccagtctccggaaaacaggatacgacggagatcagatactgtgaaaaaagaaaaaaatccccaccggagatgaatgaaccggcagggaacgtaacaataaaggaacgggctctctcaacccttgatgtaaccgtactttttcaggtcgtccatgaaatgctccggcgtgtcggtcctcaccgtcaccccgtgcagttcatggtaacggttggagaaattcaccatgtactccttatcggtgcacccgctgtcaaaccagctgccctcacgcaggagacgtacaaactcggaagggtcggaggcggtaatcctgccgccatccgccaaaatatacatatgcctgttcatgccgataattttttagttctcagtttataatatagtttctgttcaccatccaggaaggggatgtcctggagcgcggtggccgcaggcacctgcccctttgtggcaaaggtaaccaatttgtggagaaacagcacccagttacgcatttttgtgaagttggtcgttcccgaatgctggcggaactcgaccgtcttgtgccgtgagtaggcctcgagattcaccttatggtaacggttgccgatcctgcttttcagatcgtccaccgtccgggcggaacgtatcatcccgtcagagacatggcccagtccacggcaatagtagttatccctgcgggatgccggcatgaacttgtcgatgaccggttccagatgtttgtaactcagggccaggttacgccaggtctccatgctgaaaccggcggcatcgatatgcacgtgaagcccgcagctcccgttcactttcatgtcacacaggtcgagcacccagcagaccttctccagctcccgcaaccctgcttcgccgacaaggatcggactgaccagctcgaaggtgtcgtttccgtttatactgctgtccgtcacgagtttccaatgcggacgggtggtatggttgtaactttccaccgtaacctcgatatcggcctccctgagctcgcgtgcgagccgttcacgggagcagttgtaagcctcgatctcgataccgaacttgcggttgaaagtgtaatccggtgcggctgccaacggttgaacattcggaccgccctcacgttccctcatccggcgcagggcattcactacaaagccgtagtttccgttggtcaccattctcgcgatttccgcacggggaacacccagaagatacagttgccggatcttgctcgtctttgtcgtttcttgtactaaaatgtttctgatttgctcgttcattacttgtttcctcctttatttttcgctttactaaagtaatgcttttacaggagaagtcgtaattataagaaccttattatcatgccattagcttactttatcttaggctaaaactccttatttaaggtgtctataccctgacatccgctaccggtcggtatcggattcctccaggccgatggtacggcatatctcctccaccagttcaggaaggccggagcttttctcctgacggggatcgggtggaaacagcgtggagcggaagacacccttgcagacaggggccgcctccctgttgtagcggagggtgttcggaatgtgtgaggacagcagccgcagccccatcttgtcgatgacccggttccaggcgtcatacaaatccttccgcccccgcctgtccaccatgttccagaacagccaggtccctttcaggttgcagttcttcctggagaccaactcctcttccagagccttggtaaactgcagggaactctgcatgacgatgttgtccgccttgatcgggatgaaaatgtagtccatcgcagcaacagtatagaccaccccctcgctgcggagcgttccgggaaggtcgaaaagcacgatatcgaaagtttcccccttttcgtccatataacgacgcaggtcctccaccgccttttccggatcgcttttgatgaccggataggcaagcttccggattctctcgtgctgccggtaaaggctcaccttcaggtcgtcatttttcatgacactctccatgtccctctcacgcatcagggcgatgctgtgctgcgggtagtcacagtccacaaccgccacacgcaggcctttgcggtaatgcagcacactggccagcagtaccgtaaagacggattttcccacgccacccttctggctggcgacggcaaccaacaactctttttcttttttcatcatacttcttgcattaaatgttaaacactattatgaccggccgggcagggactcttccagaatcatctccaccgtttccctgtattcttccagatgccgcgagacaaggtggttgatgaacccctccagcgtgaccttcccatttctcgaggctcccgccaggatggacagtttccggtgcagggcggcaggaatatgcagtgaccggcgctgcacgcccgcaatgccacgcaggtattcctccccatagacggacggctgcatggggccgcttttccttgcgggacgcattatgtcgttaccggacattccacgtcccttccggggacaggcaggtgcttcccccatgatctcacggatgcggtccgcgtccatcccgccgggaccaatccggtcttttacgttctttcctgtcatgatatatcttcttggacaatgacaacattttatcggcgggccgttcctccacgctgtccgtcctcatcccagggacggtagacctcaccgagcagggcggcgatatcctccctgtgctcctccatatggagctccagcagccggatgataaacccggagatgctgccgcaaccggcggccctgaccagcatggcgatccggcggtgcagcctcccgtcaatatacgcggtcttccactccacagacttgggagcgggaacaagaaacctcctcttgtattcttccggggctgtcactttccctgcacggacctgcctttcatgccccggcatacccaccgccggttccggggatggggaaacgggagctgacagaaggtttcccgtgagtccgaccctctcgagaacgatatcggaaagccggttcttttccttttctgaatccattgtcttaaaatcttaatttattaaattacacaactggcattgtttcggaatacaaaataaagaaagaagaggacaggacggaaccacctgtcgcttatagtcatccaaagtcgtttattgtcatgatacacatgatggtggggacgaacatatggttccatccggatgcttcttcccatgcgggagtgacgtcagaatcctgctgtccgtagcggcgtggaaaagtggcgggattccgttccttgtccaccgcccctttcaaatccttatgggcaggtgtgggagcatgcatccgtcctgatacggattcttggattatcggtctgtggaagtgtaaaaatatcaatccgttaatggagacaaggaagaaaaaacataaggcgtacacggctacctgcacgttctccatttgcagaagtgtagaagtggcaatccgttaatggagacgatgaaaaaaaacaataaggcatatacggctacctgccattctccatttgcagaagtgtagaagtagcaatccgttaatggagacaatgaagaaaaaccataagtcatacacggctacctgcacgttctccatttgcagaagtgtagaagtagcaatccatcaatggagactagaaaaagaaaccataagtcatacacgactatatgcccattctccatttgcagaagtgtagaagtagcaatccatcaaaggagacaaggaagaaaaacaataaggtgtatacggctacctgcccattctccatttgcagaagtgtagaagtggcaatccatcaatggagactaggaaaagaaaccataagtcatacacggctacctgcacgttctccatttgcagaagtgtagaagtagcaatccatcaatggagacaaggaaaagaaaccataagacatacacggctacctgtcattctccatttgcagaagtgtagaagtagcaatccgttaatggagacgatgaaaaaaacaatgaactatatacggctacatgtccatttctccatttgcagaagtgtagaagtagcaatccattaatggagataatgcagaaaaccatgaagcatatacggctacatgtccatttctccatttgcagaagtgtagaagtagcaatccattaatggagataatgtagaaaaaccatgaagcatatacggctcactgccgctctccatttgcagaagtgtagaagtatcaatccatcaatggagacaaggaaaagaaaccataagacatacacggttacatgcacattcttcatttgcagaagtgtagaagtagcaatccgttaatggagacaatgaagaaaaacaataaggcgtatacggctacctgtcattctccatttgcagatgtgtaaaaataacaatccattaatggagaatagggtatggaaagggcagatttccagtacatacgtctcccttattcctgaattatgggcgtaagtcacatgattcaggagagatagccacctttttatggggagagcagccggcaaatgcctgatggaaatgacccgaaaatcacaggagaataaccgtacaataggctgatacacaattcctattggagaatgttgtccccattaggggacagcaagttgtcttttcgtttaacgaaaaccaaacggtttaacagcgtgttacgccgttaaaccgttacccttccaagctccgaagtcgcttggaaattattttatatcgaattaggttgaaaggtaggtatatcggactttcccataattcatggacaaaactttcttaatatacaatatttcttttggacctttgttccacgaatcaggctactttttatccttgttaacttcagttgttattttgagcttgctccttacattcctcagtaaagttatatgttcatttgcagaatttatcccacccaattacttgtaaaccaacttaccattggagtatatcgaatctttgaaattctctaggaagctctgaatgtaacgcaagttacgtctgtcgttctttcattatctaaatagcaaaacatttccgtctttcgataaaatatccaaatctatttttgatagtgaataacaccacctttgacatggattccatatcaatgtccactggagaataggctttctgatagggtaaacagaggaaaaatacccaacgagaaggagctactttacatttattttgtttgcaattttttatataacacaactgcctttatcagacgcagattctccttgcagaaccatggaaaatcaatacatctgaaatcaacgtagctctcctccaacatattgagaaaacgaatatcatttaccatctcttttacagatacgaacaaaagcggaatcctctttcttttacaaaaaaataacgccttttgcagttccgcatatgcgatagtctgttcgtccttgcaagtgaagtcattcttgttgtcaaaaaaagacaactggactttcaatgaatcatgcttttgaagatattccgtcaacttttcttgtgttttgggagaggtttcatcgccatatagtattatctctttgtattgttccatactaggtatttgttccggttgaatacacttcattgctaaaggcagtttagcgtattctttcaatagatattgtttcgtggccttacggggattttcgacggagtaaaatgtgtatttgaatattaaacggctccctttcttctgtacggattcctgctctgagaaaaaagagtttaaacgtatcatgttttcttggaggagctgtttcggaatatcttcctgataggtatcggtcgtatattcaagaacggtctttttcatactaaaacattatgagctatttactacacattttatctcatagtgatatatattgctatgaaaatattttaacataatatctccgcatgatgtttactatttttattggattcatatatttttaaggtgctcgatcgctttccttatatatgaaaatactaatatagagagtaatactgccgggatatatattgccacgtatactcctcctctgcaatacgtttcatcgcagttccttctaaatcggaacgacatatgattgatattaacatttcagtattagagaaataatacgctttattttgagtcgtttctcgattgtagaccacatcataagcaacaatcggacaaccgaagaacattgcttccaccaacgatgggtttgtacctcctgcactatgtccgtgtatatatattccggcgttagctcgcaatgaataaaggatatctaagtcataaattgcatcaagtaggacgatgttgggataaccacaatatttgttttttagactgagaccatagggactatgtttccaattgccgatgaaaatcagttttttctcactatgagtaaaagcctctagtatcatatgacagttgttttcgggttcgatgcgacagacagtaatggcatattctccagatgttagaccatagctcataagaacctggatttggatttctgtcggaattttacgatagacatgattcccaccataggcgatcaacgccgctttcttatgataagtctcatacacataatcctgtatgcccttgttatcggcaataaccacatcggcaaagcgaacagccatcgcttctgaaaaccgcagaatccaacgtgccatacgtccccatttggcacgtcggtgttccagcccatcaatattgacaattagccgtgtccgacataataaccgaaatatgggaaggcaactacacccggatgtacccaatacgaggatcgtatcatagccttgtatgactttacacaacgaccaaatatcgtaagggatactttggattccgttggcgtgcagtggaatgtatttcaacctgcatcctttgtatcgcttcttcccattgggaatatccttgctgctgcaaaagaccgtatactgtatatcaggagggcagttatctccgataatattctctactaaggtttcaaaccctccataacttgcgggaacaccttgggtacccacgattgccacttgtttcatggattatatgaattaaataaaaatttcccgctattatagatcaagcggtgaaaaaatagattgaggttgttggtaatattacaaagcttctatgcacaatatgatattacttatcatcaaattgatatcataatgctttgaacaagctaaggcattgtttgataagcgtatatacaagtttttatcttccaatatagattcaatggtttgctcaattttagcaagctgtgtcacgtctattttatatccatttactccgttttctaccatctcagcaataccaccttctgtcggtacaattactggcaaaccgacactcatagcttctagtgccgtcaggccaaatgtctccaccaccttttccttgttcgacaaattcaatacgagtgaagcacgattataaaacggcgctacatcgttctgttggggatagataagtaaatttttagagatatgtagtttatacgtttcaatgaataaatctatgttctcttgtgtgtcgttcaccactagatcaaagaaatattgaggtaagttttctgccaatttgcaaaactctaatggacttttatatagttttaacgaacctagcatcaatacttgtttccttttaaaagctgtttctggtgagaaaaccaatctgctgatgaaatcttgtggcaaagcattgggaacaacagttacacattcttttcgttgtaagaaagaagcctgataagctgacacacaaatgatttcgtttgccagcttctgcatggcttttgccaagagcttataaaatgtacccttggcaaaagcgttctcgtgatagtgatacactatccgttttcccatcagctttcccgctaatgcaggaccaattggaagcaatgtgttgatataaaatacaactcccttgcaaaacagccatcggaatgccagaaggaaggtataaaattgtaccccacaataccgtaacatggtaacagcaggattgtttgaaaaacgataaggataagaatgtctgtgtaagttttgataatgtagttcatcgaatatcccacctttagaagaaaccaaatctatccggtatccttttttaagcaatccttccaataccattttcattactttgggactgccgctatagtcattgaagagatgaaagcaaatcacacgttccattaaaaattagcctaaaagaattgaaatcttttttatcagatactttatagttttatcaatatactttctttttggacagaagtgattcgtaaagactatttaggaaacgttctcgttcagaccatttataatgatatgcacattctatagtaccttctgccaattgttggaatcgttcgggatgttcaagtagcttattaatttctatcgcaacggccgaaacacattcctcataatgttttgcaattggtatgcgtattccacatcggtcacatatagtatcatgcattccgcaatggtcgaagctcatcgttggcactccgtagctcatcgcctcccaaatagtggtgggattgccctcactcacgcttgtaatcacatgcaagtgtgctgaattaaagaccttcacggcttcaacacgaggcaactgcccatgccatgtaatcatattgtttatgtcatgctcaattgcgtattgttgcaatttttcctttaacattccatctcctactatatcaaggtgcaataactccctatgtttgacatgcgtcagagcttcgagtaaaatgccaacatttttattggaatccaatcgacctatgacaataagattgaatttcccattattaataaatttactcttattgagaactatattacctgttatgcaattttctggaatccatatactgtctttatgatgaacattcttgaaattgcgctgattttctgatgttgcagtaagcaatatgtctgttgcctttaatgctttttttaaacgtcgtttggtatggaattgaaacgtatttacaatgctacggaatgttaatttcattcgcccgattaatggcatacgttccatcaattgttgaggggcattattggttccccctacgggaccccatacgtagggcaatcccaatttccataaatatcccggttcacggtaacctatcattccaacataatgaatcaaatcaaaatgttttgtctccattaactcactggctactttatacacttgcaaatgccatactcgataagcataataaaacgtatattctaagacatgatggcggttaggccaattgagtatatttgccagcttattgggataaattggtatcagacagacatttggaataggattctgttttatgtaatcctccatttcatcgcaatctcccatttgattaccagaagcaccgtatagtacagtcaaattattttttttcgacatgtgggtaacataattccatgctacagaatattcgctgcccttacttggagaaagcagatatgctagtatcagtatattcattatcagtttttatttgttgtgatatcttcactatataaagtaatgttattgtagaccatgcaagttgagaatttacgccagtaaatagtatggagaatatccaaaaaagtattgttggtatcttgttccctttgtcatagcataaatggaatgtgatgattgcaaggacgatgaatggcaaaaaaccgtattccactgcatataaaagtaatccacctccagtatatcctttggggacaccagctaaataatttgacataaaatctgatacataatcaataccatacccaaaccatccatcaacagtaaacaaatctattttttgtaaacagatgaaagaaggaataactcttaaagctgcactttgatccgcactataaatcttatgaatatcgaaagttgatatcgcagaaccgaatttcatgaatctttttaatgctataggttctaagaagagattcactataataaaaatgcttactataagaattataatacgaaatgcactttttatagtcataaatcttgtcaagacaattaagaggaataaataagcgcccgcactcatacttgtcagcatgcaccaaaaaaatgccatccataacagtttgtcatttttccaagattcgataaaattctctttgccattgttagccgatttgatagacaaatatgaatacattaacagtgcaaccatacggccactatgctctggttcagacattaaagagttcagtttccatggttgtcgtatgtcatagttgctaagattaatgatcggaatacccaataatacacatatttgttgaatgaacagcacgattgcataagcgatcagtatatattttaaaagtttgagaatcccggattgtgaaatgttcgagaatgaaaataaatgagaaagtgaaatgaaatatagacaaaacatacagctgtaaagaactgtactccatctcattgtttccggatggttaagtaaagggcatagtatggttagaataataatggcataaattttaatatcagttcttgtaataatgggggttaagataagcagtaaaggtgatattcccattactgctattaacaacagatttctgtttccatcacctaaggtaaaagatagcgaaatcattaatgcacatattccgacgcaaaatatgtattttgatgtattaggggaaagtagtgagttcacaaggctcttcaagattttaatgcatcttttatcgcttcaagtagagcatatccatttctttcgtctggctctagatatccaccttctgcccattcattccatgcaaatacgaaaatcatatctgtatgatattctctttttactttagtgaccagttccttaaagtaacgtttgaattttgaggctgtcatgccgtcatacaaatatccgttcattcggtgtcttggtgtattatcccaatcagtgaatgcacatgggattaggttttcggcaacaggtttatgttttaggatgtttttccagcataaatcatagtccaatcttcggactgacttccggttatacataaatggcgcaagacttctatttatgtgaaacaactgttttatgaatcttatcgttttaacaagtccaaaaggtaccttttgtggttcgttgtcatacagtaggttaatatattgagggttcatttccactccataggcaaacttagacttgtcccaggaattatcgtatgctgatgcagcactttgatatatgtatgtaagaccttcaaatcctgcatctttagccatttgtgtccatatatcaagcattttgttaagttttcggattagattaggcacatatataaccattatgggtttattattttcgcacatgtagcgtgaatctttaaaaaatggaagcatataattaaagtgatttacccaatcttgttcatcatcgaaatcgtgggatattagagtctgtggtgcaccatctttggctttccaggaatcattccaatcgtggtttgcccacgaaatgcaatagttgatatcaatctccggatgagcgaggagcatctccataggtttttcgagcaacaagtgaccgttaaaccagtagtgatacatacaaaatccgtaaataccatatttacgcgctaattgacattgccattttaaagtttcaatatcactcaaatcgtaataattatggtttaacggtatgcgtggctggttatgcccatcaaaaagggggggtgcattacgtacatttacccattctgtgaagccttctccccaccaattgtcattctctggaatttggtggaattgaggaagatatactggaattacttttatattcataattgcatttattgtttttttaacgaattatagatagtcataaagcttgatttgtcaattacgtaggctatacctacatatagtaaggtatataagcaaccacctaacataatttttaaccacatattagtaatatagttataagcaataaaagaaattgttcccgcaactatagccgataatatatgcgggagcatgatttttatctgccctccccatgatacatttatgctttttttcgtgaaatgagcatagatgaatgagttcaaaaatgcagtgagtgataatgttatacatactgcctctatactgattagggatgccatgaaaatagcaaatatgttgatggatgctttgatacactctattatcagaacttgttttgattggcctaccacctgtaaaatattaacatttaatgcaaaaaaaggccaccacataatactggtaatcaatatctgcaataatttgatagaagaagaccatttggaagtaagtaatgcaataatcaaaggttctgccaatataaagagtgatcccattataaaaaacgtcagcaatgaagtaacttggatcgttttcaagtaactattacgtaacgtaataggactatcttgcatttgactaaacacagggaatgtgacgcgttgcaaaatagccgtaagattcgtagctgggaaatatcctatttgttctgctctgttatagaatcctaattgtttctgtgcgaatttttttccaataatcagagttgttatattgtttcctacagtcacaacaatgtttgccaacaacaatttggaaccgaatgagaacaattcctcaaatgatctttttgagaatgactttgtaggtaaccattttatgtaccaccatagtaagagcattctaaaaaaagcagcagaaatcatctgtattgacaaactccatacacctgcttcattatatgccaatattactccaatcactcctgataaaaatgcggaaattactgagattttcgcttgtgatttaaaatctatgttaattgtaaggatagcttgctgaacgatggagagagaatagaaagggatagtgagtgctgtcactttcattactttgtccagaagcggcatattatagaaattagcaatatatggcgccaacatccaaactattgcataaactataattccaattacaatattaaagtagaataccgtggagttgtctgtctccgttctgtcgttcttccttattaacgcatttgcaaaaccactgtctacaaatgtgtttgacaaagttagaaataatgaaatcatagcaatgattccataatcggacggctccagtaaccgggcgataattaagctcagaataaagtttattccttgaacagaaaaacgatctatggcactccaaaaagttccaattatcgtctttttctttaagacagaatccattcagaattttgttttaataagaattatttgttttgcttcaatagagacttaattaaatgatggactcccccccaacgattccaatttaatctgtttcgtctccatttgttctttttagtcccattatctaaagtgtagaaacgagtgttctatgtataagttggtcatcaatagatttacatagtttaaatacagcattcattgaagcgttggctaaatcataggtcatatttaatttcttaccagttatatggattttattatccttatccattcttttaaacttttcatcaacatttgaattgttgtgaataatcaaataccgtatttccaaatataataaagcatcttgttttatttcattggatatactaactttagtagtcgaaattatcttttctaatagttttggagtactacgctgtttctcaaaagaacggtaaatacgtttcgaaatttcttctataatagcatcataactacttaattggataatttcatgataaaataatgctctctcatttttatcagtaattgcaccaaataattgatatggattatttttaaatagttcgctaactatattagatatataatcagagaacaacctatatagttctattatcgcctgctcatttaattttcgtctgctatatgcaaatgttcgctttatgtcggttgttttatttggtatattgagttgtaaatgagttccactaacagcatggagagtcgttgcaatatttttcccattatctttctctttgttacaacatttgcatgccaaagtcaatgataaatctattaactgaagatgctgctttagggatctgattttcccatcaaatatctgaaatgattttgtcatatttttacagttttaatatgaatggtaatgttctattctatttcattctcgtttgcatatactgtacgacatggaataacttccaagccaataaagagaacacaatccctacaatactatataacccacatataggtatttgcatcttgtatgacaggaaactgcgttaaataatcgattggtaggttattggcaaaaatatatgagaaactcaccaacttgaatgcaaggaaatgaaagaccaagatatacaaggtcttatctccgatatatgcaaatacaggagcgatgcaatgtcttgacaactctctcgatagcaacactacgcccatcattcctgtcatagcaatcacataatcaatcaacacaagccatccttgcaccgttaccatatttaatttgatgaagcatgctgcaatagccggaactaacaataaaagcaaacctgtcataagcggatgggcaaagtgcatattcttcttacgacaaagataaccgctcatgtaaaacgctgttgccaataaagtctgctccccgaacatttgcggcaatgtcacaggtatgtaatgccaaaatactgaaactaagaggattaaaatccccgaaatgttttttctgttaatacttccgcttttgagagcgtattaaagaaaaacagggagataatcaaggcccaaaacaatgaaatcaaaaaccaaaagcctcccaaaagagattcactaccggtcatagtgaaagttctaatgacacgctcaatgaatgtttgccatgaatagctgttctcataaatgtgcatcgaagcaaatacgttatggaaaagcaggaaaatcaacgtccacttgacaaaaggataataagaaccttttgccttttgaatcaatccagttttcaagtccgtcacgtatttttcgtttagcagccaaccacttacaaaaaagaaacaaggcatgtggaacatataaacaaaatcatacagataagtcgggcatccgctatgacctacaaccataagaataatgcaaatggctttcgctatatctaaagatttgtctctgttgttcctcattttacgtattattgcagcatttgtaagaatgttatcttcctcggtacatttcctcgtaatacttctcgtattccccggaagtgatattatccatccactcctgattatccaagtaccagcggacggtcttttcaatgccttcctcaaactggaggctgggttcccagcccagttccttttgcagtttggacgagtcaatggcatagcgcatgtcgtgccccttacggtcggtcacaaaagtaatcaaatcgagggaagttccttcgggattgcccaacagtctgtcaaccgtctttataatgactttgataatgtcgatgttcttccattcgttaaagccaccgatattgtaggtatcggtaacctttccctgatggaatataaggtcgatggcacgtacatgatcttccacaaagagccagtcgcgcacgttctcacctttgccataaacggggagtggcttacaatgacggatattgttgatgaaaagcggtatcagtttttccggaaactgataagggccgtagttgttggagcagttggtcacgatggtaggcattccatacgtgtcatgaaaggcacggacaaaatggtcgctcgatgccttgcttgccgaatagggtgaatgcggattgtatttcgtatcttcatagaagaaatcctcaccgtatgccaaatggtgttctgaagaagatgccgtagtggtgaaaggtggctttaccccttcgggatgtgtcaattccaacgcaccatagacctcatcggtcgaaatgtgatagaaccgcttcccttcgtagccttccggaaggccctcccaataaatcttggctgcttgcaacaaggaaagagttcccatcacgttggtacgggcaaaggtgaatggatctttaatgctccggtccacatggctttctgctgccaaatggataataccgtcgatatggtattgccgcatcaactccagcatcttctcgaaatcgcagatgtctgcccttacaaacgtgtaattcggtttatcctcaatatctttcaggtttgccagattaccagcgtatgtcaatttgtcaagattgacaatgtgataatccgcatatttattcacaaacagacgcaccacgtggcttccgatgaagcctgcaccacccgtaataagtatattccgtttaaattccattgctctgtgcttttatttggttgatacatttttccaaagagtccatccaatgcggaatcttgtaaccgaaagtctcgcggaacttcgccttgtccaaaaccgaataatgcgggcgtttcaccttgcttggatattcaaaggtatgaatcggacgaacatcacattcgtttcctgccaaccgggctataaccactgcaaaatcgtaccaggagcatacgccttcgttactgaaatgataaatgtcctgcttaccggtcaatctcctgtcaagtatccagcctatggcatctgccaaatctccggcaaaagtaggagtacctatttggtcaaaaatgacaggcaacgcgtctttctctttcgtcagcttcaacatggtcttcacgaagttcttgccccatgctgagtagagccatgcggtgcgcaggataatgtaattacaaccggagttgacaacggcttcttccccggcaagttttgtcttgccatatacgccggtcggttccgtggtgtccttttccgtaaaaggaaggtagtttatccccttaaaaacgtaatcagtggatatgtgaataagcgtggcgttgacagactttgccgccgcagccaaataactgacagcaacatgattgatcaagtctgccgccttttcgtcttcctctgccttgtccacgttggtataggcagcgcaattgacaatgacatctatccgctctttctgcacaagcgcaagaacgtcatccaaattcgttatatctaattccgcaatgtccgtaaagacatagcggtctttgctgttgccggaaacccggaccatttcattgcctaactgtccgttgcttcctgttactaaaatattcatatcagtttccttatttatacaaatcctcaccgtatttgaaatctaatacggaatcttttaagcatgttctgtgcaggtctttttccgaaagaatggcattccccaccgggattttccagtcaatgcccaaagtctcgtctatcagctgtatgccgccttcgctttccggggcataaaattcatcgcatttatattggaaaacggcttcttcactcaatacggcaaagccatgtgcgaaccctttcgggatgaagaactgtcggtggttttcctccgtcagttccactgccacgtgctgcccgaatgtaggagagccttcgcggatgtcaaccgccacatccaatacagaacctttcacgcagcgtaccagtttactctgcgtataaggcatcttctgataatgcagcccacgcatgacaccgtagcttgacttgctttcattgtcctgcacgaaacggatggggcgcactttctcgtcaaattccttttgggagaaactttcaaagaaatagcctctggcatccgtaaaaatgcgtggttcgataatgaccacgccctctattgctgtctttattacttccattgtcaatccaaattttctttcccggtgtgtgccacctcgtcaatcactttcagtaggtactttccgtattgattcttcaacatgggttgtgccagtttttccattttttccttgctaatccatcctttacgataggcaattccttccaagcaggcgacctttaaaccttgccttttctcaatcacttccacaaaaatggatgcctcggcaagtgaatcatgcgtgcctgtatcgagccaagcaaagccacgtcccaacgtctgcactttcaatttgcgctcctgcaaaaagacttggttgaccgtggtgatttccaactcgccacgggcggaagggcggatctgtttggctacatccaccaccttgttgggataaaagtaaagacccacaacagcatagttggatttaggattagcaggcttctcttctatcgaaaggcaatttccgttaccgtcaaattcagccacgccataacgttccgggtcatctacccaatagccgaacacggtggcttgattcgaatcttcggcattttttaccgcttctctcaatagcttggaaaaacctgttccatggaagatattatcccccaatacaaggcagaccgaatcattgccgataaatttttctccaataagaaatgcttgtgcaagtccatcgggagagggctgctcggcatattcaaaatgtacgccatagtcagaaccatcacccagcagccgtttgaaacctggcaagtcgtatggggtagagataatcaatatctcacgaattctggcaagcatcaataccgaaatgggataataaatcatgggtttgtcataaatgggcaaaagttgcttgctcacgccctttgtaattggatataaccgggtgccggaacctccggcaagtacaattcctttcattttctatttgatttgagagttattgcaatagattgttttaactgtttttccataacaagttgggatattgcatgaaagtgatgcgtatcagttccccacatatctatcagatgttcgcgaatcatccactctactttccgacgagcatcagtgccgtatgtattgagtaaagatggtaaattggcttgcaatcggacaccgatgcttttcaaatgtttgtaatcgtcctcatccatatacacataccgttcgggatgcgccaggatggggacatatcctttcgatttgatgcggagcaggatgttattcagccccatcgggggattgaaataggaggtttccactaacaggtgttttccatcttttcctaaagggagcaggtcgttctttgccaaacgttcttcaaacaggttgtcaagcatattctcggcagcaaggaggagagtgatgttcccttgataagcggcattcaatttcgcaaaccgttctttcaaaccctccgtcgtgttcggaatatcctccatgatgtgaggagtcagccaaacctcgctgacccccaactgttcataaaaggagaggatttgcagggattcctccatcgtctgcacaccgtcgtccacgccgggaagtaagtgacaatgccagtctataaagccttggaagaatccgctatccttcaatcttatttttttcttaaagagccacacgaagtagacaatgaattaagaatgaatttttatgattcttcattggtatatccgacatatccgtaatggtaaccatacttgtacccatatttatatccgtacttgtagccgtaatgcccgctacctccgtccgtaccgttcaggataagtgacaggttcctgtatttcttgtcggtgtagaatttctctatctccggaagcatactgcggtcgagcagcccggcgcggacgatgaacagggtcatgtcagccagcttgttgatgatggcagcatcagccacgatctctaccggcggacagtcgataaaaatgtagtcgtattccttgcgcagattgtctaccaattgctctagccgttctgcaaacagcagttccgtggggttgggaggaatggtacccacgggaataatgtccaaattggcattgtcggagcggatgacgacctcatcaatgcggtttacctgtccgacaagataatcagagatgccggcctttggcctgcccgcgtactcgcttaacgagcctttgcgtaggtcgaggtcgatggcaataacccgtttgcccttgatggcaaggctggtggcgaggttaaacgtgatgaaggtcttgccgctgcccggattggctgaggtaagcatgatgacgttcgatgcacgttcctttccgaccacgaactcgaggttggtgcgcaccacgcggaaagcctcgttgatcacgttgcggctcttatcctttactactacggcgcacttctcttctttcggttgacgcgagaaacggtttccttttttgcggaatgcgagcggtatttctcccacgaatggaatggtcatgctctccaggtccttgcgtccgcgcaccacagtgttcatcttctcacggatgaagatgatgaccatcggtatgagcaggcccaaggcgaaagccaccagcaggatgttcttcttcaccggggcggtagggatcatactgccgcccggcatggtgatgacacgggtattataggccgtgaatgcctgcgagagttcgttctcctcgcgtttctgcaacagataaaggtagagcgattccttcactttttgctggcgttccaccgagagcaggtatttggactgctgcgggttggaggcgatgcgtgaggtggcctgtccacccagtgactgctgactccggatttgtgcgttcaatgcgaccagctggttgtcgatggaggtgagcaacgcactgcgcagggatgagagcgaggcatccatttccacaaccaacggattcttcgtgctgctgtgtgccacgaggctgttgcgctccaaaagtttattgttgtactcggtaatctgcgtggcaatgcttggattatctatgcccgagttggcgggaagtagttggtacttgttgctttcattggccaagtgtccccggatgtagcgggccatgtatgcctggtcgttcaattccttgatggaagcatctgcttgactggcctgtgccatgtacatgctggccgctgcctgcacgtcgggtaacaggtgctcactcttgtaggaggatatgtcatcatccacattccccagctcgccttctatcacgccaagacgctcgttgatgaacatcgaggtactgacggctatctggttcttggcctttacccagttctcgttatagacagcaatgagggtgctcagtacgtcttctgcccgttggctggagacatccctgaatgacagggtgatgatgttggacttctcgtcggtctgagaaatggtcaggctggaggaataggaacttacgactgtctgtaacggagaatgtgacacttgtacaagcagttcctccccttccgtataggatgcggcaggcatcacgacgattttccctatagggctttgtatcgtgtcgttaagacctccatgcacaggaacttccaaatccacatcctccccatttctttcaaggtcggatagtgtaataataccgtccttttccagtctcagggtaaatgaggcggattcgtttcccggaaggtctatgactgatacgtcaaccggcagctggtcgccgtaaacggtttgtctatgaaagcctccgggtacataataattcatctgcaaatgcagcctcgttaccacctcacgcatcaagtccggagattgcaaagtccccatctcattgttcacgttggtattcgatgtgaacatgccgaaatcggcgaagctttccatcgcgtcggaggtggatttgcccttggaatcgtccttgacaagtatggaggccgtacggatatagaccgggggcgtgatgagcagataccataccgctataccgaggcatgcggtcaatgaaatgacaaaccagtgccacttgccgagacagaggtaaaacaggtcttgtatacggatgaaatcctgctggttttgtgcagggatgttattttgtatagttgccatgtcgggtcagtttacaattaatatggcgatggaggtcagcagggaagccaatgaaatccagaaagaagtggagcggacattgttgccgttcactgtggactggcgggccttcgtgtcgttcggctccacatagactacatcgttctgctgcaggtaataggcaggagaggaatagatatgatctccggagcagagattcacgccatacacacgttgtttaccgtcctcgttgcggagtatcagtaccttctcacgcttgccatagacagtcagatcccccgcctgactcagtgcgtccaatatagtgatattgtccttgtcaatgttataccgtccgggattgttcacttctcccaagaccgagacggccagattcatgaactccaccgtgaccacgggatctttaaccaaatcgtgtgattgtaactcctgtttgatatgcgaagccacttcctcgcgggtcatgccctgtatatggattcttcccaatacggggaagtctatattcccgttggaatccaccgtgtaaccggacattccccggttggtaccggtagatatttcctgccccacctgttgcgaaatgatgggcaggttgaaaaggttggtcagtctcaagtcctggctgttgaccaggatggacactttgtctttcggctgaatctttatttcaacgggagccgtaagttccaattcgctctctccgggacgtaagtcctggaaataagagatttgtttgggcgtggagcatgagcctaacgcaaggacaaatgtcgccgccatcagaattttgcaaaatttcatattcggttataactatagtttcttgttaattgagcttattctgcgtgtcagccagatattggccgccgtccataccgtaatgtccgccaacaatagtacggtcacgtcaacatggcacgacagcaggatgttgcatagggtgaacaacacggataccgacacgatggtaatcatggccgcacgctgcctcatgccgacggcaagcagcttgtggtggatgtggttcttgtcgggcaggaaagggttctttccgttgcgcatccggtgcaagtagacacgaaccacgtcgaagcagggaatgataagcggcgaataggccaatatcaggatattgggatggtccgatggaaatccgtccggaaaactgtgcagcaatttcaggctgaggatgcacaacatcatgccgatggtcaggcttcccgtgtcacccatgaatatcttctttccccgctttacatcgccgaacacattataatagaagaacggtacgagcacaccaagggtggcgaaggcaagcacggcgtagatgtactggtgtgccgtgaggaagattattccgtagaaaagcatcgccaccccacacagaccggaagccagtccatcgatgccgtcaatcaggttgatggcattgatgatgaacaccactgccaggaccgtaagcggccagcctatccagcagggcagtccgtggatgaaaaacagtccgtgcagatcattcatccacaagccgcccgcgataaccatcagtccgcaagctatctgtactacaaacttggcactgtagcggatgcctatcagatcatcggctatgccgacaaggtaaagcaccatgatgcagcagaagccgaaggagagggcacgtccttccgaaataagttccccaagcatgtccccgtaaccaagcaaaaggctgacaccgatcaacagggcgaccgagaggaacaccacgggcttgaaggctatcccgccgaggcgtgggacaacaccttgatgtatcttgcgctcgtccggcacgtcgaaaagtttcctttggaaagagatcagcaggatttgggggatcagaacaccagcggaaagcacgcagaaaaggaacacaaagatggagctgattgtccaaaaaataacgggaacatcgagcccgtcaataaatgtcataaagtcgttcatgtcagacgaattgtatatattcgggggttacctccacgcccacggaaaggaaacctttcaattctaccagcaggcgttttacctttgagccgcgcatggtgagcagattgccctcgtaaccgtcaagaggtccacccacaatgtgtattgggcgtccgtacatctgcggggttatttcctccggcaagtaatattgggggaattccgagttactgacagcacggatgaagcgatccatatccgcatcggggacggtcatcggttcgcgccaggtgttgcgcagccagcggtactgcagggtgggagtttttttcactatggggtcaaggttcaggcgagtttcatgtacgaaaagcagatcctgtatgaagggcacttcctcgcggacgcgctttccctgtctggtacacagtttgtacactttcgggacaaaaacttccattttctttccttccaacagtttataggcaggttctttggcattgatccgtttcaagtcacgcatcacgtaccactgtttcgtttcttcattcccttggggtgtcctcatttcgattcaagacaattctatcaatcctgcatgatggtggaactttccataaatcaagcagttacaactattcttctcaaaagttcggggttttacccctgcataacaatgtcgatctgtcttcatcaacaatgaatattgtctgccttatagcagattcttacgcgctatttacgcctctttggtcgtacctctctccctaagagaggtacaatgaagcatagtatgaataaaacaatcagataataaagcttttaccttcttcctgaaaactgtctgctcaacaatttgctttgcggttttaagaagcagtccatgttttattatcattttttgcttgtttttgtggtcattctcaatatttttcgtaaatttgcacccgcttatacctctcttagggagagacaataattttaactcaacaccattttttttctatccttgtgacatttttacagtgtgtctccggggcttccccaaacaaatccgcttcaatggaagatttgtttttcttatactctcttgaaaagagagcattcttccgcccaacattttatacatcctgcaaagattttagaatcaacctgtttgccttgtcaatagtggcggtatccaacgaggccagatagatccttgttgtggcctccgaatcatgccccataccctcactgatcactgaaatcggaatgttcttgctcctggccgcactggcccaggaatgcctcgccacgtaatgggtcaaagggacagaaaggcccagttccttcccgatggttttcaagtgcctgttgaccaaatgggaggcgttaatgtactgttttctctcgtccgtccccggcctgccgataacgggaagaaggtacggggattcgggaatagtgtggcgatccacgatctcctgcatgcacggctcccattttataaagagctgctgcccggttttcttacgccggtatgagaggatgccgttattaagatccttctttttcaggaatgccatatcgaccatggacatcccccttgtatagaagctaaagagcagcatgtccctcgcataggcctttgcgggctcaagtgacaggtccaatgacttgagctgctttatcacatgtaggggtaccgcccgtttcgttgtcttctcaaccccagtatagacatgtctgaatggaaaacgctgcacggtcagtcccttctccacggcacggttatagccggcacgcagaatacgcatgtaaaaggagaccgtgttcatggaaattcctctggacttcaaccatgcctcgtatgcgatcatcaggtcggagtccatatccccgagtggcatgtcctttccattcatgaaccgcatgaagctgttgagtgtggagccgtaggtctcgacgagccgtatcttccccagacgttccagaccgtcgataacctcccgcatgaaaacaaaaaagaaaagaccgcaatgattgccgtgaaaagcggaggtcacgtcatcggcggtgaaagcacctcccttacgtcccagagctgtgatgacattctccagcctgtcggtatcctcggaaatcttcttgtccagtgacaatagatattgccgcctgccctcatcggatggcgtgatgatgatacgggaatgttgtttgctccactcggcgggaaacagtttgtagggagtgttgatctgtcttgccacacgtttgtggattacttggtaatagaccgtaccctccctgccatctacggaagatgatcggaacttaatttttacagtagccataaattctctgattttaaattttacaggatgcaaaattatcagatacaaccacttattgaagtatgcaaaatattgtatttcagagaataagaatctttgagctgttgataataaggaaagaggagaatgccatgtgccttttgcaggaaaagtgtattggcctcggaagagaaggatatcgtgaaacgagggcactgaaaaaggagggcactgaaaaaggagggcactgaaaaagtttccttgcagctttttaaagaattaaatctgcacatagcctgtatattatttggctatgtgcagattttttgtaccttaatgccataatatttaaggtccatgctatcacaacaacaagaacttccgctcagtgaatatagttcactctacgatatagttgtcccccaagacaatcttcttcgccgcattaatgatcttgtagatttcacttttgtctatcaggaacttgccaataagtattgcaaggataatggtcgaacagcagaatcccctattcgcatgttcaagtatcttctgctgaagaccatatacgatatttccgacgtagatgtcgtagagcgttcccgttatgatatgtcctttaagtatttccttggtatggctccagaggaagacgttattaatgccagcagtctttgtaagttccgcaagttacggctggaagacatggatcttatgaacctgctaatccagaagagcgtagaaatagcgatagagaaaggcatcataaaatcaaggactattattgtagatgctactcatacagaagccaggtctaacccgtactccccgatagagattctgcgactccgttcaaagcaactccgtaaggtactttatgccatggatgataatatcacgcaaaccctgccgtctaagaataaagaggatgatcttgcgcatgagttggattataccaaagaccttctgaaacttatcacttcagatgccagtctttcagaagtgcctgcagtaaagcagcgacttaacatgctcaaggaaacgctttcagatatagaggatcactatacgacctcaaaggatgcagatgcccgcattggtcataaaacagaggacagttcgtttttcggatataagactcacattgcaatgagtgatgagcgtatcataacagccgcaactgttacttctggcgaaaagggcgatgggcctcagttgaaagagcttgtggagcaaagcagaaaaaacggaatggaagtgaacactgtcattggtgataccgcatactccggatcggaaaaccttagactggcagaagatgaagagaagggatttactttggtatcaaaattacatccggccataagtcatggactcaggaaagatgaagacaagtttgattataacaaggatgcaggcatgtttgtttgtcctgccggtcatatggcaatcagaaaagcaaggcaggggaaaagggatgggaaatggaatcaatccatgacttatttctttgatatagagaaatgcaagacttgttcacgaagagaaggatgctacaaggagggggctaaaagcaagacctatagtatacctatcaggaatgaagaacagaaaaggcagcttggattccagaaatcacaagaatttaaagatatagctcgtcaaagatacaagattgaggcaaagaatgcagaattaaagcaggtatacggttatgataaggcactgtcgtatgggctggatggtatgcagatgcaaggtgctatgaccatctttgccgcaaatatcaagagaatattgaaactaagctaaaaacacttataaaaattacccacgtataatatgatggccttactgactatacaaggccgaatataaactcctatcaagatatataaaagcagattgcaaaaccgatataaaggctaatacaatctgctttcgtctttttaaagattgggattaaatcttaagaggatacctttttcagtgccctcctgaaaaagagtccccactttttcgacctttgaaagaaaaaagttatagtttgtaacttcaattgacaaattgatggcgttttacgacactttttacgttattatgccttgaaatggcgttttttatcatcatccacttacagtttgaagtcgaaaaacactttttcagtgccctcgaaaccagcccccctttgccatagttgattttagtttcttagtccattattaagtacctgtttttttcacaaataaaatatgtatttgtacttaaggaatcgtccttcgactgatgcagaagaaaacagaatgttgtaattcgctcgtttctgaatcgttacgtgttgttaacggaacagagggtaactatcttattttgttttacaaaaatatacagtgtttcaggttttgcagacgtacatcagaatgagatagtatcccttcgtgtatcggcagcattacatattatatataaatgcttgttggatgttggacaatcggagttcgttccctctcttgtcaaggaatagaggaatatcccaatcatcagatatccccatccctcaacgccaagaaagaaatgacgagaacatggcagataccttttatgtaccccttcgttctcaaagagtcacggcattactgtgatgttatatcagctgtatcggaattatccccgtagaaaaaacaaggaaatgtagagatattttcggtaaattgccgtttcagctatcattgaaattctctctatgctttcctacacaacaactctcaaatttatcattttttcagttcaaatcccagtctgagtccgtcatacgaatcagcgatacagctaattgtgcccgctgtagagttaacactcgataccacccctgtgatggttttcagtatggcgtcaattttccgcattgctttcaatttcatactcatgtcaatttaagttttattatttcaggaaatgaagttgtgatgtgtataatcttgaaatgatagtctccgttgtcttcaagtttcggtgcagggaatgtatggctttcaggcggtttatcatgagcaagctgaaagcaagtcacgataagagacctatcaaccttatattcaccagataggctttatgcgtaagcttgtcgaccattgctacaccaagactttgtccctatgatctcgtttcacctgctgaatgcgaggttcgtggtgataatgttcgctttctttccaatcctgagcgggagatggttgaagagcatttccacacaatttacatatccgaactcttcacagacaacttggtcgtatttcttggacctgttctgctaggcactcaggctcttggctgaccttgactcccggaactgcacgagctgcttggaaacggatacgattcaaaatccacctcttttcacatggtggggatgatgcattgtagtatctgctcctgtgacttatagaagtggattcttatacatttgctatctggggaagggcaccaagcttgttgtttaagtatgctcgttgaagtgaccgcattttattgacaccatttttggaaatgagaggatataactcagaatgtccatcatctcttttatccatcaaccagaaactatccttgcgaagataatcatcaacagctgtaaacaacggatcgtaatgtgttgtcaggagcaactggcttcttgattgtactttcaaaaaactctgtatcataaactttaataacaatgggtgcatagatgtctctatctcgtcaataggaagcaatttgttgttttgttctgccacgtagagagcagtttcgatacccatagctcttagcgttccttcactttgactggcttttggcaaagtgtatatttcctttcctcttttattaataactgacacaatgaaatcagttttgaacccattaggcattttggggtctttgctcagtttgcttgcgttctcatccgagagctgccctgacgattttatgaactgtatcatttctggtgtcaaagacatgtaatctttctccacagccatatcctcgatgttgaatccaatattatgacagaagtccaaaaggtgtttttttgcatcgggattttcaagcatatttctttctgcataattaaacatcttctgacctaagtcgataactggcaacgtatggttaatcatccaatcccttacatcatcaatttcacctaaattacagttgacagccttgcgggcagcaaatagtgacatgtttttaaggcattttgcggtcaattcatcttttactgcagcggacaccttgatgagtgattggttgaactttagtgcagtgttactgtcaaccaattcgcgatgcatgaggagtgatggttggttactgttgtagacatgtaatttctctgaaaggatgtcctttggtgacaaaataagttgataaatgtattttttgccgttgatataaagtttgagttcaaactcggtgggttgcgatggtgtgtcactgtcaaggatgaagggttctacaccagttggggcatcctgatcatcggttttacgtttccaaaaccaaaagagatactcgaatgcttcaaggaggttggacttaccactggcgttggcaccatatataatagcgatgcgagagagacgggtaccgtctgccatagtgaccagcaaagaatcctccttgaatgtgtcttttgaggcctcaaaacttatagtagtttcctccttgaaagaaaggaagttcttgattcgtagttcaataaccataacatgtatttattttatttgagagcaaagatacgcaaaaaatatccgaattagagactatcttatatatatatttagatttcatagccttgattcggacaatttgtgtcaaattaacagttagaatgtttattctgtcagttggcagtagtgtggcctgtcagcagtttttcaaaacgttgacaggtagtactgttttattgcttattgggttaaatggcgcattgtgtgctaaaacaagaaatgaattcgcgagcttaaagttcccttttactgattttggcatattttttgtcaatatgaaagagaaattatttataatttaattatataaaatatgtatatagtagtatttgatgttggcaacgcgtcttgcaattacatttgctcgcccaataagtacgcgatgatgattgattgcggttcttcagctgagaagcagaaccctgtcgagtctattaaaaactttagcataggcaatagtgaattgttaaagtcaaaaccttatgtaacttctaaaggaaagtcatatccattagcactactccatattactcatccagatgacgatcacgttagaaattcagaaagggtatataatgagttaacgccatatttgttatgccgcaactatacagagctgtatgatgattcggctttgattaataaagattatgtaaagaacctggataagaagtatcgaggtgacaatcctgaaataattgactggggctttgaagaaagtaaaacattttcaattccgatagatactgtaaagtcggatcctaagcttaaaagcaaggttagaaacaacagcagtattatacgctatataaagtataataatgttaggatactgtttgccggtgatttggaaacggtaggttgggaatggcttgctaataacaacatgaactttcgaactctgatgaagaatgggttggatgtgcttgttgcaccacaccatggtcatgattctggatttcccaaggcattgtttgacctgacaggcaatgtgaggaccatcatattgtcgaaggattcagaggcaacaaaggaggggacagatgtgtatacgggatactcgaactatgctgatggtgttaaatattataatataggggataaacattcatattttggtaaagtcctaacaacacgcagcaatggtaacatctatttgtttatagatccaagcaacggactatatgttgtgacagaaactgcatctcccaatcataaaaaactttaaggtatatgatggataaatacattagagaagcaagggtatatccggctgtcttgggaatgctccctacatgtatattgatcgccatgtgcatgagggagtggttccctcaatatcaggcactattgggtaatgttaagtgggtactgtgtctgattggtggaacagcattggcaagtatggccgtaggttatctagtaagagaattatttaaggagacatcgaagtggctcttccaatacccgctattcaaaaaggacgagacggagatgcctactacaaagctgttgctttggcagaattcggtcatctcacctgcgtatcataatgagatctctacaaaagtgaaagatacgttcggtatcgagctgcctactcgtgaagaagagctagcagacctcgatatggccaagaaaacaattgtggatgcagtctaccagattaggcaaaattgccgtggtgataagatcttgagacagtataacattgagttcggcttctgccgcaactaccttggtgcaagcgtatggagtattttgttaataataggtatagccgttgctaacatcttccgcagttggttgccgtggtggactttagcgatagcattgataattcaagtgctgttgatggtgggctgctatctgttattggaaacaagagggtggtcttatgccaagtacctatttgcaacattcacaggaaaaaaataaagagaaagcttatgaagatagtaatttttaatgtcgggcctgctttgagtgcctatattgagatgggaagtaataaaattgttgttgaccttggtaagggcaatgacttctcaatggtaaatgatttcctgcttcctctttttaagaagcgaggcaaattgaagtatttaagagacaaatattatctaagtcaagtctttatctcacatccccatctggatcatatttccgatttagatgatttggaaaaacatttttacataaatttgtttactacaccaaatgatctgtcgaaaggatcggaaagttataaaaatgttaactggaacttggtagacgatcctggtagtaatgaggttaaaaaggttaaggaggtatataagggaagataccttcccctaagggtgtgtgacccttctcgaatgaccattggttatctttatcccggctgggttgagaataacagcactcttagaaacgaaagttataccaataatatcagtatcgttctgtatatacactctggctatagaattttcttcgccgctgacatccagaaggagggtatgaagaaactgttagaggataaccctgaattgaataagaaactggggcagggcgtggattttctagtgtgccctcatcacggtttacgctcttcgttcagtaccgaacttttcggtgccatgaaaggtggtaagacaaagaaacttaatattgtttcggaaaaagctaatggtgatgataatagaaatgtagacagtagatacagttcgaccgactattgtgaaggtgacaacaatctgagcacagataataatattgtctgccagagaaaaacctctcaaggtcatattttcattgatgatgatggtatagtgaccatagaggaggatattcaaaagataatcgagaaattttgattcatattgaggttatatacattagcatacctgtttgtgtaggtagtaatacgatttcagaatgtttgcaagagtttgaatgtcggctactattcacatacaggttatgatatactccattatgatggaaaatggatttgatttcctctttctccactgcgtatttatcttgtccctcaagccgttccaggtgataatagaatacagaatgagctatccttcttaattccaataataagtcaagaggatattcagaccttagttcgtcaatggcttctacccattgagacgtgcccgggtttcctgttcctcgactaaggccttcacttttttagcaacgcattctctgccctctggcgcaagttttccgcctgaagcttttccaattctgtctgatattcttttttcttagatcttgccatatgtcggaatatatgtaattcctcatatccatgtttacgaatcgtacgaacccagccttcaagtgctgtacggcttatacggtactttatcaatgctctcgtacaaccattccttaataacttgaggctttatgttggggtgtattcttagggtattaaccccgtatttatcatataaacgtacccaatcgatagctcactatattgaacttttcaaaagtgtatttcataaagaatgcacctcaaaagtttttggtctaacttttgggggcacttcaacattcaataccctcttctttagggatgactttaagccgattaatgcggaaaaagattgcttttgtcacgagtaaaatgtatatttgcaactggaaaatcgttctttgactgatgcagaagaaaacaaaatattgtaattcgctcgtttctaaagtgttacctactatcaacgaaataggtgataataatcttattttcaatcaaatagataattcattgtgtttcgcggtgtacgtcgtcaacgcaacttttatatcagctgcaacagcgattttcttcaaatggcggttgatacgccctaacgccaggcggtattgtttgtatcccgaagcgtattcaccgctgattatcggaaagagatactcattttccgtcttgtatttatccatcaagccctgcatctgcggagtcaccgctatgcgaatcaactgtttcgacttatgacgggaataagtcagcacaccattgcaaatatcgctcttcctcaaaaggacaatatcgacaaaagccattccctgcgcataaaagctgaacagatacaaatcgcgggcaaactccagttcaggttcattctccaaattcaagtccgccagattctgcatatccgtccgtgacaaagcacgtttcaccgttttcgccgggcgggtctgtgccttcgcaaacggatattcgccacgaggatgataaccgtccgctaccgcctggttgtacagggaacgcaagttgcgcagataatagcttaccgtatttccggaagagccgttactatacaggaaatcctcgtatctcctgacgaacgccgaatcgacctccgacatccggacatcggggcggcttataaattttgccaacgacgagcgggtgctcttgtaggccgcagccatccccactttcttcagttcctgcttacgctcaatctgcgcattgatatatcgcaataaataaaactgtggttttcctgtaccaaaagcactttgagccagaatatcctccactgtaaattcttcccttgtccgctcaagctgcctgatccgtgtatcaatccgattccgcatcttccgcagctcgcggttcattttcacgacctctgtagccgtaaaagtagaacctacgccattcataatcttcccttccagctcgtcaaacacctcctctttcacccggtagcctgtatacagtaacttttttctccgattgtggatcacctgaaatactaaaggataactgccattattcaatatcctgctcttattcagcataagtttcactgatgttatcatatcttgctttttttgtttgaaacgtaaaagtacgaagttcaccttacttatcagaactatttttccgcctgttacgcaagaaacaagaaatggaataaaaagtttttccactttaagaatagttatctgataaatatagttaaaatacacgttctagtaatcagtatatttttattacatatttccaatatgcatacgcataaattagagatgtatactatttatgatatttcattacataatataaatatttccgctattattccttttgaaaaattagaatattaggcatagctttgcactatggattttagggagccgtccgttcctttaaaaggaagaggtccttcctcggtgtgcaacgggtcgttccttttaaaggaacgacccgttggttttaaaggaaaaaccggcatttgtaaccatttgaatttcaacttcttactgaattaaaattccgtcccgtaacccatgggattttttccaacaaacacgacagaatctgccgcacgaagcggcaatcagtatacaacaaatttcaacaatccaaaattcaaatcccatggttacagccacgtttgccatcaagccatatctggcgaggtatatgcatgtccggtacggacaaagtttagaacttctatcgcacaacaatccaccttcaaggctccccattccaatccacctctcccacctcactcccatttatcacttcctgcatcaattatctgttcctcatccgcaaggcgtctcctggaaagagactggaaatatcacttttgttcttcccagcccaaggcaagggaagaatccggaagtttataattatttcggtcaggacagtatctttattattgaaaaggaaattgaggtggaaatgaaagcggagctttattcgtttctgttggaaaataagttcaaaaatggggtgatgtatataaagtcgatgcatgagtttgtggtaaagtatgatatggcggagtcggtggaagaggaaagtttgatgagagggtttcagaggtggagaaagaaaatgaagagatgacgctacgaaaaaatcacaccttatttaatagtgatcacttaataacgacaggttacacaacgttaaaaaaaaatatcagaaacaaccgactcttattatctaagaatttactacttttatacctgcataagaacaatggtagtattatggaaaaagaacgatatttcattcattttaaaggtggactgtataaaatgctgggtattgcccagcatagtgagacacttgaggagatggttgtttatcaggcattatatggtaaacatgaaatatgggtccgccctaaaactatgttttttgacaaggtagtccgaaatggtattaaaatggatcgttttaaagaaataacagaaaaagaaatatatgcctattacccagaactaaaagatttgaaggatttaacatgggaggactagtaagttaaaatagaatgaatataagaactgataccaatataacatacgagaagaacagagatattattcaattgatgcatatcttatccaatcccagtacctcaattgagatgtatcgtaatagatatatacccaatcttgttaaagaacgaatggcgctataacagagatactccgtgaatgtccctctttttcttataaatcaagaagaaagttttacaaacacgtcgatcgcttaaatatccccaatatacttcccatactattcatccgattttcagatgaacttcattatttacggtattacgttctgtttgataaacaatattataaattactcttaaaatatctaccacaatgtacttttttagtttttcatccaatgattacacatgtatttgaagttgctgtttgattgattcagctaaggcattagccaaattaaccgggactgcatttccaatcatcttatatccagctgcaacactattataatagaaaataaaatcatccggaaatgtttgaatccgagcgcattccctaacacttaaccttctataaagatgttccttcccttctacaaattttctcacattttgctctacaaattccatcaaaggtgcttgcggatgtataggagcttgcctgcccccagcctgaattgtaaatgattgttcatcccattttcgcaccctattcctagacatgaatattggagaaaatcctcctgtcatatattcatggttagtcactttacaatcagggtttgctttattattcccaatggaagggacgacattatctgcaagatctccaatcgcgtcttttaatgttttcttataaggataaggttttggaaattcgaacttaaaattaagatctttccttatacctataaaaaatacccttttacgatcttgcgggacattataatcatgtgcattaagcatattaaatgataattcatagccaattccagcatttgcaaacatatttttatatttgataaagcttccgaatgtcttcctaaaagcatcccactaacattttctgctaaaaaaaacaaaggctgtttatcctgtagaatacgtataaaatcaaaaaacaactgtccgcgtttatcattgattcctcttaaagcccctgcttcgctccaactttggcaaggtggtccaccaattattccatcacattccgggatgtcagttgttggaatatcagttatactccttttatctaatattgtattgctatgattcttttcatacgttttccaaatatctttatcatattcatttgcccacacaatatcaaatccagctctctcaaaacccaggtctaatcctcctgctcccgcaaacagtgaaactattttcatctttacctatttattgttattcaagttgatggcaaagatacaatttaaattgtattctaatccccaaaaacattaatttgtagacaatagtccgttgcacaattgtcgaagaataaagaactttgtaaagttatgacaataaatgaattatttggtattagagtgagagaacaacgcatagcattaaatctctcacaagagaaattggctaatatagccgacatagacagaacataccttcctgacattgaaaatggaaagcgtaatgtttcactagctgttgccgaaaaaatagcaaaagctttaaatgtaccattaaccaaacttctagaaacacatgagtaattttggaaaaacagaacgcaagataaaagacttatttttatccgaaaaaaagttcacttacgaacaagccaactattcggtattaaaatgtgataagcccacgtcctctaaaggagaatgcaaaactgatgtatatgtattagcccaagatgaccttggtaatcaaaaagaatttaaaatatcagttaaacaaaacaatgctgattttctagaaaataaaattagcttggatagagcaattgaaattttaggaagcgacgcacaatcaattattgaaagaagcattgcaaaaataaagaaaaccttcgaagatgattacctagtatatttcaagccatacaagaaaacgaaagctttaagcttgacaatgggctggaaatttgagtttataaataagttaggaggaaagaaatgtggaattatagatttaaccgaccaacaaaaaatagatatatatgctggtacaaatttaaatttagataaaaaaaattctagcgtaaatggtgaaactgtcataaattctggggttgctaattacattataactatagatgcgcccaataaagatttaaattattatctatctaagatgcagcctattgaacattttgcaaaacaacaagatatatattttgtttgtaaagccttaaactacagagccaacaaagacaaatgggatggggacagatcattgtctgtgtatgttaactggtttctagatcaagaaggaaaactccaaggaaagctcgttttcgaaaagccattgtcagtaaaaggacatagcataggcaaaaatataaaaaacttgttagctactttgcaaataaataagaacaatttccatgaactaaataaatatctacacaaagacgttagaagaattcaataattcatcgaagtattataccttttataaatggatatttggagcaaaaagaaacgttctgccgttatggcaaaaataaggagtaaagacacaaagccagagtggattgtacgacgttacttgttttcaagaggataccgttatctcaagaatgtaaaaggattgcctggtacacccgatatagtattgcgtaagtatggtattgtaatatttatccatggatgtttttggcatgggcacaaagtagacggacatattccacattccaacagtgattattggcgtaataaaataaagcgtaaccaacaaagggatgaaaagcataaagaggttttaaagaaaatgggctggaaagtaatgactatttgggaatgccaattaaaacctgctgtaagagaacagacattacatgaaatggaatactggataaaccatagctttttagaacattatcggcaaaagcttcctaaaacttatgagattacagaaaattctccctgcattgcagccgataatataacggaatatgaaaaaaagagaaataagaatgctgtttttacaggagtttcagtaacttcgcatctaaataaacaccccataattatgagtagtaaaagtaatgaccaaggaagggcttatgaattcgtatgtttgctcacccttgaagaaaaaatcaaaaagcttcgtcctgtcaatataataaaaaatagtagttactccgcagcagaacgtgcatggtgcactttatccaatgagatgcaagagacttacaaggcaagctcttatgttgccgttgctaagatttttgaattagagccccgtatcgtcgagaacaataatgacattttggaattactgatacagacagacgctaaagggaaaaaaggtgatgtacgagatatattaataatccggcacaacatccagtgggagattgggttaagcctcaagcataaccattttgcagtaaaacatagccgcctaagcagaagattggactttggaaaagaatggtatggaattccttgttcacaggattattggaatggagttaaaccaatattcgactatctcattgcagaaaaaaacaaacatacaaaatttaatgaactgacagataaagaaaatgacgtatacatacccttgctaacagcttttataaatgaaatcaaccgacaatatcaggttcataaggacatccccggcaaattggtagaataccttttaggcaagcatgatttctataaaataattagcatcgataaagaacaaaccactcggattcaatcgtataatttgcacggtacgctcaatcaaaacagcgaatcagaacaagcatccattcaaattccagtagcatgtttgcctacacgcattgtgagtttaggttttgttccggagaaaactaacactgttgagctttatatggatggtggttggcagttctcttttcgcatacataatgcagaaacctatgttgtgccaactttaaagtttgatattcaaatagtaggcatgcctactgctataatcacaataaattgcctttggaaataaatatgatgaacttgattagccttttttctggtgcaggaggtcttgatttaggctttcataaagccggttttaaagtagttacagcgaatgaatttgatgctaaaatttgcccgaccttccgagccaatttttcagatactaatctaattgaaggagatatccgtgatataccatcatccgaatttccggataatattgctggtataataggcggacctccatgccagtcatggagtgaagcaggctctttaaagggcattgaggatgcccggggacagttattctacgaatacattcgtattttacacgacaaacagcctttgttttttgttgctgaaaatgtatccggcatgttggccaagcgccatacagatgccgtgcgtggcttcatggaattatttgacaaagcaggctatgatgtaaatttgaaaatgcttaatgctaatgattacgatgtgcccgaggaccgtgaccgtgtattctatatcggattccgtaaagatttgaatattcataactttgaatatcctactccccaaaaacacaaaccaacactacgtgaaagtatctgggacttgcaatttacagctataccggctctcgaaaagaacaagacaaatggaaaggcttgcaaaatacctaacaacgagtatttcattggtgcatattcgcctatattcttatcccgaaatcgagttcgttcatgggatgaaccaggtttcacggttcaagcaagcggtcgccaatgccaactgcaccctcaagcacctaaaatgattaaggttgaaaagaatctgcagaagtttgctgaaggatacgaacacctttaccgcaggatgacagtccgtgaagttgcccgtgtacaaagtttccctgatgaattccagttcatatatgatgatgtgaattatggttataaaatgataggtaatgctgtaccagtaaacttggcttatcatgtggcaatgcaaataaagaaaactttggttgaaaagggaatcattgttgatttgaaatgaaagtagcatctttctttgcaggatgtggcggactagatcttggcttcgagcaggctggttatgaggttatctgggcgaatgaatttgatgaaggtatacacgaaacctatcagttcaatcacccaaatacatacctatgcaaatccgatatccgtacattaaaggctgctgatattcccgattgcgatggatttataggaggacctccatgccaatcatggagcgaaggtggtaaacagttaggactaaatgatgaccggggacgtttgtttcttgactatatccaattaataaaacaaaaacgtcccaagtttttcatcatagagaacgtacaaggaatgataagcgacaagcattttaaaaccttcctgtcattcctttccagccttgaatgtgctggttacgtggtaagctattcgttgctgaatgctgctgattactgcataccgcaagatcgcttccgtgtatttattgttggcttcataaaagaactgaatggcgcattcaaatttccggaaccatcacaaaagcctctggtaacactgcaaaaagcaattggtgacattactgaagaaccacatctatatgacaatgaacgcgtaaaccaagaatatgagaaatggactaaccatgacgtttttaccggtccgttcgatacaaaatttatggcccgtaatcgcgtacgttcttgggatgaagtatcatttaccatacaagcacaggctaaaaattgccctttacatccgcaggcaccagttatgaagtacgtttcccccaatcaacgcatctttcttcccggttatgaacacctctaccgtcgattaagcgtgagggaatgcgccagaatccaatcattccccgataaattccgtttttcctatacacatataaaagaaggttataagatggtgggaaatgctgtaccccctcggctggccagatgcttagctttaagcatcaaagatgctctaggctctatgaacggaaaaaaggaagcagacgttcttgttgcttattataaagacgaacaccaattacgcatgacattgaggaacaaactttattatgtacgcacagggtttcgcagaggagcattgcaaatgccaataggagctacttcccctaaatatctgttgctacacaattgcagtaacagatatttgtatgcaatggtagaagatcacccgaaagtcatgtctgggtcagaactatcccaccttggttttgccccttccggcaatgaatacctgacgttcaaactaaaaactgcggaatgtatcaatcttgaatgcttgaatttagcagatgtaaaattccgaggcaataaaagagatatagcaatcccttatatcgccaacattcaagaacttttttaaaacaaagcatacattacaactacctcaaaacaggaattatttaacaatagctctttcactctttttttcaattttaagtatcccatcatcgggaaactgattttgagcaagtttcagtatttcccaaaagaaatgagaatctttcaaagctgaaatcatttttccattagatactctaggcatctccccttcttcgcattttctatattggttatcgccaaaaactaaaaaattaaacattcaaagtgcaaacataccatccaagcaagtaaaggctatacgtaagcaatacaatcttacacaaatcgagttatctaaaaaatcaggagtgggattacgttttggtaagcgtctccgcgattctatcttgtcgcccttttttcattcttatatttttgcgatgtataaaaatgaagcattatggatttagcagaaaatcgatttggaaaaacttggaaacatttccttgaagtattgaaagtagactacaattgttctttagccgatgtttgccgcgatcagcataccacttttggtggtatgagttcctggatgtccagacggggctatagcgttaaacaagccaaggcagatgtggtccgtgattattatggcggcgttgaaccctcccaaccgacaacttcctctccttcattcactcaaatagcacccgccatgttgtcggaagaagagtttagtcttgccgggatcacaatcacctttaacagtggaaccaccatttcagtcaaacgggccacacccggtggtgtgattaaaatgttgcgcgattacgaaagaaaggagggagatccatgtattctctaacatcagccaatcgatactatctgtaccagggctttgttcgtatgaaccttggcattgacggtttattcaaaattatacgatcggaaatgaaggacttgtctcccgtttccggagatatctttttattctttggtaaaaaccgacaaagtgtaaaaatactgcgttgggatggcgatggctttcttctgtactacaagcgcctcgaaggtggaagttttgagttaccgacatttaaccccaatacaggcaattacgagatttcttatcaggttttgtcttttatcttaaatggagtgtcattaaagtctgtacggttgagaaaacgttttaggatctaattcaacattctgattattagacatttgcaataaagatatcatccggtttatttggctaattcgttgattttttatatctttatgccatgaaaaaggatgagatcatagagttattgaaggaacaaatcaagggattacgagatgacaacaacagactcttggaccaaatagatgctttgataaaggaggtttcttcccttaaagaggcactccttcaaaaaggcgaatctcttagcaagcaacagcgccttactaagggactcgccaaacttgtatccaacacatccgaacagcaacaggctccccaatctgccatatccgaagaagagcggcagaagatagaagcggaaaaagcagataagcgtaaagcaagaaagaacaatggggccaaacgtgacatgcattatgagatggaggaagaagaacatgtcgtttatcccgatgatcccgattttgacatcaataaggcccggttgtttaccactgttcccagaatatgcgtccgctatgaatgtgtacccatgcgcttcatcaagcatgtctacaagatacacacctatacacaagaaggtcgcctgtttgagggaaaaacaccggcctcggccttcttgaattccagctatgacggttcatttattgccggattgatggaattacgttatatacaatcgctacctgttgaaagaatcatcaactacttcgagagtcatggctttacgctgaagaaacctacggctcataagttgatagagaaagcctcaaacctcttcgaaaatctttataagtgcatccggcagacagctttgagtgatccttataaggcagccgatgaaacctattacaaaatactcgtcccggaaaagaacagcaagggaaaaggagtcaggaagggatacctttgggtggttgtcggcataaacaccaggatgatatacttgctctatgatgacggctcccggtctgaaagagttattcttaacgaattaggcagttgcaaaggtatcatacaaagtgatggttactcaccttaccggaagctcgaaagcgatgcttatcccaatatcacacgcatcccgtgcttgcaacatataaaacggaaatttatagattgcggtgagaaggacccggatgcaaaaaggatcgtggagctgataaacgcactttatcaaaacgagcataagcataaagttggggttgagggatggacggtagaacagaatcttatgcatcgaaaaaaatatgcgccggacatactcggagaaataaaagatgtgtttgatgaaatagaagaacggggggatttattacctaagagcgaactgcaggaagccattacctatcttcgcaatgagtggaatgcagtggtggacatctttaattatggtgacacttatctggacaacaatatggttgaacggatgaaccggtacatatccttatcaagaaaaaactcattgttcttcggcagccataagggggccgaacgaggcgccatactctatacgatagcactcacttgtaggatgcataaagtgaatctatttgagtatctcacggatgtgataaacagaacagccgaatggcaaccgaacacaccaattgaaaaatacagggaactgcttcctgacagatgggaaaaggctaatgactaaaaagggatcattagcctttttattttaatacactatatagaatcgcggagacgcttactacgttttgttcgtgaattggaacaaggcaaacagactcttcgagtagataaagtaaaccaaatactaaatcagtttggaagtgaagtaggcgtagtgcaaataaatatcacttaaatttcctacattttttcctaatgaagaatatgtcaccactttgaagtctacctttgtcatcgaacagtgacaatatttatattatgaaattaagaaatgcagaaaaacggctgctaattgccgttagccaaattattgaaaacgaaggattcagtaaaatcggagtcaataagatcgccaagcaggcaaaatgcgataaagtgttaatctaccgttattttggtggactggaaggtttattagctgcttgggctaaagataatgatttctatactttagcttatcaggcttattcggaaagagtgacaaaagcggaaagttctgaagatattattaaattgacccaaaccgtcttattgaaacaactgaacttcttacggacaaacaagctaatgcaggaattgttagcatgggagttatcgggaaattctacattcagaagtattcaggatgaacgggaaagaaatggtttcaaacttcaggaggaactggaaaagaaattgggaaaagaatcgaaagatgtacgtatgttcatcactatattaattgcttctataaattacattgtcttagccacaagacaatatcgtatattcaacggtatcgattttagtaatccagaagcttgggagttatgcaagcaaactatttataaatacattcgtgcactttttgaaaatatcctgaaatgaaacgattttatcatttaacgactatgccacacaatattattgaatgtaatacaatattatcctgcttagtgatatgctgttctatattgtatagcatttcttgtaatgcacaggcccggcagagacattttgaatctgtttgtggaaaagaaaagaacataataatatggaatgagaaaacagaaaacaacattatttttctgactacttcccaaaattcagaagttcatcattatcgcctctcgcctttatgcacaactctatcctggcagttgactgattcaataaaacatacgaatctgactattgtcttatataataataactactattttaaaggtacactcaacaaccagccctataataaaacggttaaaagcaaaggctatccgtggtatcaaaatatagcttattctgccggacaaacaatcaataagaatagtataaaatacgagtgttttcgtcctgacaatctggaattatatgtcatgcaggcagaacgaaaagctaccactgtattattcaacaatcaaaaaacctatgaaataaaggtgaggcttacaggcatcttatctcacttttggagttgcctctactatttcaatgcggcaaatcaccaattcataggttacaaaggagtaaacggcggtcccggtactcctgaaacaattatcaaagctaaataaataatactcaatgatatattcacgatttaaatttaaaaaaaatagaacaatgaaagcaattattatctatgtttctacttaccaaagtaatacgctcaaagttgcccaaagaatggcaaacgaactatctgcttttttagccactacccgggaagcagaaaatatcgacttatcagattatgacttaatcggactcggttcaggaataaactttgcccaacatcactgtaaacttctctcatttgcgaagtcacatgaattcagaaatcgcaacgtcttcatcttctccacccgctgccgtccattccttggaaagtatcatcaagcactcaaaaggatattgtcagataaaggtggaaatcttatcggtgaattttcctgtaaaggttttgataggactggtccatgggtagcaataaacggatacaacaaggcacgccctaacgagaaagatttatttaaagcgaaattatttgccgatagtatgaaaagacgcatacatccattagccaaattctccaaaatgaagaaatttatgattgataagatagactattcccctatctacaagcatccctctaacgctaataagattgccggcaaaacgacattattaaatattacgacttgtattcattgtatgaaatgcatcaatctatgtccaatgcatgtgtttgagataaaggaatatgataattcaaggattattcttcccacgggagaaagcaactgtatccaatgtcagacatgtagcaggaattgtcctacgaatagtatttttattaatgagtcgttcatcaacgggatacggattgctattcgggaagcaggcagtgataaactacagcaggcatatagatattattaggatttacccccagttcggagatcagttttgaagctatctgtctaagaatatagcttttttcaattataatcgaaaaagccagagtaaaaacacgttttctcgattataatcgaaaatttcattttataggattatgtattaaatctccccattcacccctaatccgaacaaggcaaaatcgcccaaacatggatcatccgggaagacctcagccaatgctaccgttatctggcgggcatttttcaaagaaaaggtttctgcatccgtcaacttgaaataatgggctacccggcagacatgtgtatccaagggaacaatcaaatccctgcgatcaaaactctcccaaatgcccaaatcgaccgccgagtcccggcgaatcatccaacgcaaaaacatattcagtttcttttgaggacttttggcagagacttcaagaaatgcacatagcttttccatcggtattccggggtatgtcttcaaggcttcttccaaactttcaaactgtgtataagcaatgtataatcgctggaaatatccatagaaatcagcatgtgacagcatccgataaaaactaccggttgcccccggtgggaaatccccctcccactgacgggacaatacatactgataaggtgaatctcccattagcccgtgcagctcttccgccttcttcaatatctgtttgcgattgccaaaactcataattgctgtcagcaaaccgctgacttcgatatcctgtttcagcgtataacgatggggaaactgcaccggatcgctttgtataaagtctgcgcgatgatacatctccgcacacattaaaagtttattctttatatcttcagtcatttcgaggaagtatcaagtattgaaagtacaaaaatacatattctagtcggatttcctctttaagtaaatgatagattgtatccctaataaaataacaaacaaatattctgccgtcatatacacagtcagagaagcatgaaaacattcacttaacagatacagataaatcaaatatacaagaatggtgattaactggaagataaaggcgagcttcgtctttcctgtaccggtaacagcattgatataaacatatccgggcagtgcaaaagcataattcaacagcataactataaaaggatagaaagctagtctcaccagattatcgttattcgtataaaatccgataacccattggttaccccaaagagccataactatcaatggaacccccacggcataacccaacctaagaactttatggcaaacgggaaaaagttccttcccctgccccgccccaattagattgctgactaatgaaccagtagtggatgcaaaagagttgacaatcacaaaaaagacggtagaaacactacgagtaatattggaaatagcaagctctgtccttcccagatgctcgatagcaacgaagaacagaaaccagggagcaacgctgataaaagagtgaagcatactccatacagatatcctcaacaactttattaacactttcccatcataaacgaccttcagcccatatttcactttatctaccctcacccacatatataataggagtacgataaaagctccgaactctgccaaagaagaagccatcgccgccccggatatacccagattcagtttgaatatcagcagatagttaaaaggaatattgatacagatagccatgatagctgccacggacaatgctttggtcgttgttatccctaccagaaaagaccggaaagctaaaaaaggaaatgagaataacaaaccgaagctacgccaatccagataatgaatcactgcctgataaatttcatccgaagttatcaaccggcgcaagatcaagggagaagccaaatggagcaataggcaaagaatgactgccatccccgacaggaaatatactccctgaaaaaatgtacgtcccgtctctttataatgttgttccccatttctccgggcaatcattacctgcagcccgatgctgaatccgaagcccaacatataaacagctaaataatagattccggcaagcgcagaagctcccagttcgacttctcccacatgccccaggaaaatagcgtcggtaatattgattaattgttccatcagaatgctcatcatcacaggaaagttgatgagccatatttgcttatatgtataattcattgctcaacttaaaaataacacgatacggtataccacatcatagcagcacacagttccgtaaatttataaaaatggatataaaactctttgccaggcgagtagttgcctgtcggatagctgaatagccctgttagaaatgatgctattcgttgagcgtagctatatgcagagtttcataaatggatgaatattgctggtttatcaatcaattacgcaacaaagataagaaatcttattttcatatcccaatgtggtatggtattagcagattacttatagtaaagaaatgtattaaaaacattgattgcaacattaacagattgatttatacagatataccatattctaaagctaaggaataattcttaaatatctttctcttttgaaaaaaggcatatcattttgaaaagagtagtaaccaataaataaccagataacaatgaaagtttgtaaattcgagaaaattaaagatgaggatgaaatgaagcaagtaatcaattgtattcagaaagaacatccttatgtagctgtagtccctatattggcacaattacaggagtggttacaggctatttccatcagttggtttcacgaagaagatgaagcttctcataccacagtcaatgccatcgaagcatattgctgtacccttgccaatcatctcattacagattcgcacttaaatcaggaaattaaaaaccggattctggagtgtataaagaaaatacatatacttgtagaagacaaagcagatttactgattgataaaatgataaaagcggaaatatacggattatccagcgatttattcacttattgcttacgtcaacagggtcttcgtgcccaaacattagataccggcaaacttatacagatcaacctggaaagaaagccggatatcccatatattcaggaatctatccaacaatacattgacgagaaccggaatgtggatatttttatcgccccactttccatttgcaggaatgtgtatggtgaaatagactttatgagcgaacaacgcaatgattactatgcaacagtgcttgccaccttattcaaagcggacgaaatactgttatccacccctatcaaccatatctacgcaaaccggaattgcctgcgagaacaacattcactaacttacatagaagccgaacaactgattaacagcggagtacacctgctctacgcagattgtatcacccttgcggcacgctccaatatagttatccgcctaaccgatatacacgatctgtcaacagaacgactctatatatcttcccatgacacaggcaacagtgtcaaggccatcctctcacaggattcggctacctttgtacgttttacctcattgaatgtattgcccggatatttgtttatgggtaagatattggaagttatcaacaaatatcaaatcaatgtcatctcaatgacctcatccaatgtatccatctcgatgatgctgacagccagccgggacaccctgcgaatcattcaaagggaactacataaatatgccgaaatggttatggacgaaaatatgtctgtaatacatatcatcggctcccttcattgggaacgcacacaagtagaaagtcatattatggatactatcaaagatatccccgtatctctcatttcttatggaggaagcgatcattgtttcacactatctgtacataccacagataaaaacagactgattagttcgctatccagacaatttttcgagagtcagtgcgcagcctgattcaaagccggataaaaagagacatctgaaagccaaataaaaaaaataaagagatgaaaatagctattataggagccggacacatagggagtgcaatcgtcacttgtctggcgcaaggacatctttacaatgagaaagacattattgtctccaatccaaatatcgataaactggagagactgcaagaacatttccctgcaatacacataacgaccgataaccaacaagccatatcggaagctgaagtaatcgtcctcgccatcaatccctggaaagtagatgaagtattgtcccctctacgtttctcgcgtacacaaatcctcgtatctcttgtgtccggagtatgtatctcccacctggctcatttaacagaagccgagatgcctatctttcgggcagttcccaatatggccattacagaacgttccagcctcactttgatagcttcccgcggaactgataaagaatatcagcaattaataaaacagatatttgaagaaggaggaaaatgcctgttcctgcaagagaaacaactagataccacttccgcattaacctccagcggaatagctttcgccttaaaatatatgcaagcggttatgcaggcagggattgagctaggaattcccggcaaggatgccatgcaaatggcagcgtatagcatggaaggagcgacagaactgattctgaatcataacactcatccattgctggaaatagagaaagtaaccactccgggcggaaccactataaaaggattgaacgaactggagcacaaaggcttcacttcttctattattcaagccatcaaaagcagtgccacaactttgattgacaaagaggaagaagatgcagaaaatttccgatagtccttatggtatggtttctcaagtcctttttgcctattttgaaatgctatatatcccaaagccagcataaaaggacttaagaaaatgtatgcttagattttatattcctctatcttccggtacagggtggtaagtccgattttcaacaagcgggcagcttccgttttattccctttcgtatattccaacacacgcgcaatatgcctgcgctccattgcagccagttcaaaactacctgtactatcgtccgaacattcataatgagtgttctggatttccaaaggaaggtcgcagatatccagccgtccaccttcgcaaacaatcaggctacgctcaatcacatttctcaactcacggatattccctttccacggctgttgttccagcgcttccaaaaaagcaggagtcatctcattgatggcatacgaaagtttttcggagaaacttttggcaaaagcagttgcaagaattctgatatcaccggtacgttcacgaagcgaaggaagatgcacctgaaaaaccgaaagacgataaaacaagtcctcacggaaatgcccggctttgatctcctcctgcaaattccggttggtagcagcgatgatacgcacattgactcttgtcggcttggtatcaccgatctttatatattctcctgtttcaaggatacgcagtaactttgcctgcaattcgaaagccatctctccgatttcatccagaaagatcgttccgttattggcctcttcaaaaagccctttcttatctttcaacgcaccggtaaacgaacctgccttatgtccgaacatctcgctttcgagcagttctttgctgaaagacgaacagttgaccgccacaaaattctgtttgctccgcttgctgttataatgtatagcctgcgcaaagacctcctttcctgttccggtttctcccgtcagcaatacgggaacatctgtcacagacaccttctgcgccaaagacaccgactctttcagcacttttgactcccccaggatagaatcgaacgagtacatttgcccgaccttcttttccagtttttcgagacggacattcatttttgctttctctacggcacgactaatgagagggataatcttgttattatcatctcctttcgttatataatcaaacgcaccgtttttgatagcctgcaccccgtcgggaatattgccgtgagcagtaagaagaatcacttccacattgggagctatttttttgatattcaaaaccagatccactccgtttccatcaggaagaaaaacatcacataaagctacgtcgggcgattgaatttccagttgtttgatggcagttttgcaatcacctgcctgacacacttcatagccctcaagttccagcatacgagctaaaaggctgcgaatctggacttcatcgtcaataataagaattttattcatacaaattgtctacattaatatagaagaatgaaaaacagggtgcgcaaatatagtttttttatctgaatccatgaacatttcttcgcccctgtttgttatttccacaggaaactatttacactataaacagatgaaaataattattattgggggagttgcaggaggagccaccactgctgcccgaatcagacgagtagatgaaacagcagaaattatccttttggaaaaaggaaagtatatatcatacgccaattgcggccttccttattatataggaggagtgatagaggaacgggataaattgttcgtgcaaacgcccgaagccttctctacacgcttccgtgtagatgtacgtacagaaaacgaagcgatttttattgaccggaaaagaaagacagtgaccatccggcaaagcagtgaagacacttatgaggagagctacgataaattagtcatctccaccggagcttccccggtgcgtcctcctcttccgggaatcgaccttagcggaatcttcacgttaaggaatgtcaccgacacggatcggatcaaagaatatatcaagagccacgctccgcgaaaagccgttatcgtaggagccggatttatcggtctggaaatggcggaaaacttacatacacagggagcgaaagtgtcgattgtggaaatgggcaatcaagtgatggctcctatcgacttctcgatggcatcgctcgtccaccagcacttgatggataaaggagtcaatctttatctggaacaagctgtcgcctcttttagccgggagggaaaaggattgaaagtaacgttcaaaaatggtcagtccatttctgccgatatcgttatcctgtcgatcggagtacgcccggaaaccagtctggcacgagctgccgaactgactatcggccccgcaggaggtattgccgtgaatgattacctgcaaacgtctgatgaatcgatttatgccatcggtgacgcaatcgagttccgccatccgatcaccggaaaaccctggctcaactatcttgccggacctgccaaccgtcagggacgcatcgttgcagacaacgttctcggggcaaaaataccttacgaaggttctatcggcacttcaatcgcaaaagttttcgacatgaccgttgcttcaaccggtttacccggcaagcgcctgcgccaggaagagatagattatatgtcatctaccatccatcccgcctctcatgccggctactatccggatgccatgccgatgagtatcaaaatcactttcgacaaaaagacgggaagattgtacggcgggcaaatcgtcggttacgacggagtggacaaacggattgacgaactcgcgcttgtcatcaaacacgagggaacgatctacgacctgatgaaagtggaacaagcgtatgctcctccgttctcttcggccaaagatccggtagcactggcaggatatgtagcggaagacatcattaccggcaaaaccaatccggtatattggagagagttgcgggacattgaaatggaaaataagttcctgctggatgtccgcaccccggacgaatattctttaggcagcttaccgggtgccgtgaatattccgctggatgagcttcgtgaccggctggccgaactgccgaaagataaaatgatttataccttctgcgctgtcggactacggggctatcttgcctaccggatattgactcaacatgaatttgacaaggtgcgtaatctctcgggaggactgaagacttatcgagccgccactgctccgattatcatacgcgaagaaaatggaaatgaaatagacgaatcacccgaacaacagggaggtagtccccaagttgggcaacctgcggttgctaaggtttcggataccacggttactgccacggctgccgtcaccgccgatgcccttgcaacccccgctaaaacagttcgggtagacgcctgcgggttacaatgtcccggcccgattttgaaaatgaaaaaaacaatggatacactggcttcaggcgaacgggtggaaatcacctcaaccgatccgggatttccgcgtgacgccgccgcatggtgcagttcaacgggcaatcaactgatttcgaaagacagctccggaggaaaatctgttgttgtcatagaaaaaggagaaccaaaatcgtgcaatattgttacttcatgtgagggcaaaggaaaaacctttatcatgtttagtgatgatttggataaagctttggccacttttgtactagcaaacggcgcagcagctacggggcagaaagtcaccatcttctttacgttctggggactgaacgtcatcaagaagttgcacaaaccggaaaccgaaaaggatattttcggaaaaatgtttggcatgatgctgccttccagctctaaaaagctgaaactttctaagatgagtatgggcggaataggcggaaaaatgatgcggtatatcatgaacaaaaaagggattgattcactggaatccctgcgccagcaagcgctggaaaacggtgtggaatttattgcttgccagatgtcaatggacgtgatgggagtcaaacaagaagaactcctggacgaggtgaccattggcggcgtagcaacgtatatggaacgggcggataacgcaaacgttaatctatttatttaaaaaatgaacaaatgaaatatttaaataaggtatgaaaacaatatgtgcaatgcgtgatgtattcaaagcaatgggaaactttgaaacagcatttgaaaaaatgtaccagataacgcttaatgaagcaatgatattgtgtgcccttaaagaggcttcggacaaagtgacggctaccaacctgtctaaacaaaccgaactaagcccctcacacacatccaaaatgctgcggatactggaagaaaaaggactaatcgtccgatcactcggaagtgaagaccggagacagatgtatttccatctgactcaattgggtaaacaacgggtaactgaactggaacttgataaggtagaaataccggatctactaaaacctctgttttaataaacggatttttcaaataaatatctgtaaataataaacggtgagcaaactccctgataatagggcagagcgctcaccgtttttctttccgccgggccaaagaaatatgttaattttccggcaaaagaaatttccacgcgaacctttttccacctttcttgttgtttgtatcaaaagcccaaggtacctgggcgtgatttttatataacctaaacattataaaagatatgaagaaattaattcctattttattggcggtctttgcactcgcttcatgtgaaaaagacccggacatgggtaaactggatgacaattatctggtatacactaactacgacaagaaagccgatttcaaagttcctacattctatctggcaccacagattctggtcatcagtgatagtaaagaaccggaatatctcgaaggtgaaggcgcagaacaaattctggcagcttatacagacaatatggaagctagaggttacgaagcagcagctgaccaggaaagcgcagatcttggtatccaagtgagctacatcgcaagtacttattatttcaccagctacacacaacctgaatggtggtggggttatcccggatattggggccctggctactggggtggcaactggggtggtggatggtactacccgtatgcagtaacttatagttatagcaccaactccttcctgacagaaatggtgaacttgaaagccgaacagggagacagtaaaaaactgcctgttgtatggacaagttatctgaccggatttgaaactggttccaaagctatcaaccgtactcttgcagtagaagctgtcaaccagtcatttacacagtcaccttatcttactaacaaataaacaactacaactgttatgaaaacaagaaaaaatatatacttcaaggtagtagccttggcggctattgccatcgccttcgccatgccggctaaggcacagctatcggacaatggatatgcaaatatcgactggcagttcaacgctccgctaagtaacaattttgctgataaagcaagcggttggggtatgaacttcgaaggtggttatttcgtgactcctaacatcggtttgggtcttttcctcaactatcacagcaaccacgaatatgtaggtcgcgaaaccttccaaatgggcgccggtgaagtgactaccgatcagcaacataccattttccaattgcctttcggtgctgctgcacgttaccagtggaatcgcggtggagcctttcaaccatacgtcagtgctaaattaggtgctgaatatgctaaaatccgctctaatttcagcatgctggaagcaagagaaaacagttggggattctatgcttctcctgaagtaggtatcaatgtattcccatgggtttacggaccgggtttgcactttgctttgtactacagctatggtaccaacaaggctgacgtactgcattacagtgtagatggattgagcaacttcggcttccgcctgggtgtatccttctaagactggctgacaactatcagaatattacgttaataataaaaaaggtaaaaggtagcttttaatataggcaccttttacctttctttttttattttttcttcatcgcatcataaatagctccctgtattcgctcacgaatgtgcagttggttcagtttgcgatttgttacatccggataaatccggttgctaaggaatacataaaccagttcattgaccggatctacccatgcacatgtaccggtaaagccggtatgaccgtacacttcggcaggtgcagcaggagcacaatttcctttcttcggatcatcagcatccggtttgtcaaagcccaagccacgccggctgatctttgaagtttccgtagtaaacaactgacaggtttctttgcttagatagcgttgaccatctatttctcctccattcagcaacatctgataaacgcgggctacatcacgggcagtagagaaaagtccggcatttccggccaatccgccaaagaaagcggaagcctcatcatgcacaaatccctgcaaagtctctttacgcaagaaacggtctttgttggaagggacaatttccgatttggcaaaacggcgtaaaggcaggtaacctgtatgttccaaccccatcggctcataaaactcacgttgcaaataggcttccataggcataccggccagttgttccaccaacattcccaagagtataaatccgacatcactatatacatagcgcttctgctttaacggagcttctgcaattttctcttctatcacctttcggaaagaacggtttaaccacaaactgtcacagatctgaacagtataatcaccggtcttgaccggagaaatatattcactcttgaatttgaatttcggattcgcccacgtagtcgtaccaatctgtaccggatggtggatatctttacgtgcgctgaacaatcttccatcatagctatccttgtcaatagcttcctgataaaaaggaatccaggaaggtaaaccggactgatgatacagaatttcctgaatcgttatatctttcttatcagtacgttgcaaaaacggcaaatgatccgaaattttatctgtcagattaaaacgtcccttatcgtagagtttcataatggcaagcaaggtgcccgtcgtttttgaaagggaagccagatcgtagatattcgtagattcgacacgaggacttcctttacccgtataagtaccgaaagccttgtcgaacataatatgaccgtttttcagcaccaccacctggcaaccgggataggctccctgatgaataccatccaatgcaatggaatcaatccgttttagatgagcagaggaaagcccgtattcttccggaacgaaatgcaacggcgttttaggggtaatagtcactcctgctcccgttggaaacagttctcccagacttgccgacaactgtccgtctgcagatgccttggcaaatagcacatctgccacctggcgctgcacgtcactactatagctatgtcccagcaccaccgccgaagcatgagccaccgcgcgctgaatctgcaacatcatcttcccgggagtaaaaaacagataaatggccgggctttcgggaacaaacttagcaaagaaaggctgataaggagccagccgctgttcactgacggctacaataatccgtttataggtagacaaagaatcacgcaaccgctgattttcctctttcgtctgattggcacgaagggaaaaacgagccaaagacgtatagcgggaaagttgtttcgccaacgcatcagtttctccgggatctcctacctcgagcaatgcaatcgtctgctctttgtctgtatgcaaggggagaatatgattcttgttgttcagaactgttattgccgctaaattcaaccggcgaaccaaatcacgcgtttgcggactgttaatccgttgttccagaccggataattgtacatacgactttttcttcagtcccaacacatatttataagtcaagaccttacgacatttgctttcaatatcttcgcgggtcaactctcctttttcaatggcttccagtacggccggtatctcttccttcaagtttcggggagacaataccatgtcattaccagctttcaaagcctgcaaactgacatttccatttcccgccactcctttcatggcaagcgcatctgtaaatatgagtcctttgaacgccagttcatctgtcagcaaatcgtatacgacattgcgggacaaggaagacggaagtccaccaatcggttctatcaccggaacttgcaaatgtcctaccatcataccgcccaatccggcacggatggcttctttaaaaggataaagttccacactgtccagacgctcacgagtgaaaggaagtaccggaagcgccttatgcgaatcaacatcggtatctccatgtccgggaaaatgtttacacacagataaaacccctccactttccaaaccggaagcataagcgataaccttatcagccacctgtatcggatcttctccaaaagaacgggtattgattacgggattttcaggatttatattcacgtccgccaccggagcaaagttgacctgtactccaatctgtcggcattgacgagcaacttcacgcccgtattcatagagcagcttgttgtcacggatacatcccaataccatattccgtggaaaaacaggcataccacgcaaacgcatggccagtccccattctccatcaaaggtaatcatcaaagggacttttgcctgccgttgcgcccggtttgtcagttcaacctgattttgcatcttcccaccggaaaagagaagtccgcccactttataggtgtcgattacttcgcgcaacagttccagatttcgtttggtatctaccggggcaatggtatagatgaacaactgccctaccttttctttaaaggaaagcttatccataaccgaatcaacccagtgccggcagtctttgtcctgaagggctttatacaccagcagaggttcaacggttgtagcattctgcgccggacttgaaaccgtgccggccgcaataaggaataaaagcgttactattgaggggattatcttcatttatgtttcaaagtcaaatcgagacggcctacacgaacaccattttttcccgtgtgcataacaggcacctcttttccgtccatattcaagtatgttttggggcctttcataaatgtatgagagtgcccgcccagaatcacgtcgatattgcgtgttccggcaaccagatgttcatccatttgaatgcccagatgagacaggcatactaccaaatcacaaccttcttcgtctttcaacaaagcagctatttcgttggatacgcggacaggatcttcataaacgactccttcgcatttattagcctgaatcatcccttccggttgggttccaagaccaaacacaccaattctcaaaccatatttctcaagaacgacgtagggtttaactatatctttcaataccgtagcatccagattatagttggcacaaacgaccgggaaattagccatcttgaaaatacgttccatattatccacatcaaaatcaaactcatggttaccgatagtcatagcgtcataacccatttcattcattagtttaacttccacttctccgcggaacatattataataaggtgtcccttgagaaatatctccgcagtcgaaaagcagcacattcttatgctccttgcggaactgttcgagaaaagcagcccggcgaagaaaaccacctttattatagtattcgtcccccttctgattgacaggttcgatacgactatgcacatcgcttgtttgtaaaataatcacttctttggtatccttatcctgcgcaaagattgagaaagtaaagctcaatgcaagacataacaggaataatatctgaaatcttttcatattcaatatttttagattctcctttttattttatggtaatacgtccatccagtttagaggtaatcgctttgccttcggcagtctgtttgcgtacataatcaagaaatagtccgcgtaaggttgcgtcttcggggcatactctcttttccgcctgcaggaaagcatccatccgtccgtttccatctgccagatagtcgatagtagccaccgtgtagagctggtcatcctttagtggtttttcaccgacaaaggcgttcagcaactttccatctttggtgatttcaagacggataccgctcactccttctccgtgtagagatgcaatcgcttcaaaaagacgtctcaagtctgttcctttcatagtcagtacgcaaagagaattctcaaaaggaagaatttcaaacacatcgcctaccgtaatatctccttcgggcaagatattacgcaagccgcccatatttaccaatcccatatcagcaggtttccccaacacctgaacagccgcttgctgcaaaacacctgcaacaaggttcgaaagtaaactttcgggacctcctttgtccattttcatcgcactggtgccgatgacttcatacatcatcgcatccaccttttccttataaggctttaagatttcggcagctttcgcgttgggatgggtatcccaaacagaatcaatcgttatcatgctgccctctactttagttacttcgtactgagccgtagtctcgcgtgcggtccggcaggaagtaaacaggaagcctcctgccaacgctgccaccatcagatactttgcataagtctgtttcatgttcgctatttttagatatgctacaaatatacaaaaacatttggctatctggcaaataattcgttactttgcaccgctttcgcgcaatcgctgtcaagagaagagatacttggtatgttgcgttgtaacgatgaaacaatttaataataacaacaatggatttaattaaaattgcagaagaagcattcgctaccggaaaacagcacccgagcttcaaagcaggagacactgtaacagtagcatatcgtattatcgagggtaacaaagaacgtgtacagctgtaccgtggtgttgttatcaaaatcgccggtcacggagacaaaaaacgttttactgtacgtaaaatgtcaggaactataggcgtagaaagaattttcccaatcgaatcaccggctatcgatagcatcgaagtgaacaaggtaggtaaagttcgtcgcgctaaattgtactacctgcgcgctcttactggtaagaaagctagaatcaaagaaaaaagagctaacggctaagccgaacttttcgattcgaaataaaaaagggaacttcataatgaatgaagttcccttttttattgctaccattctcgcaaagctattatctgggaagtacattttctcaactatactcacacctgtgagaaaaaatactcatacctatgagaatatattcccattagtatgagtattatttctcatactagtgagaataaacccttttctgaataggctgtagatgccttgtagatggcggaaaggaataataaaacaaagccccgaaagtcatagactcccgaggcttcatcacctttattataataatgatatattattctttcaaatctttcagttcccaagccaatgcactggcacccagtacagcagcatcagaatccttcaattcggaaacgagcaatttcgtcttacctttatagatattcaggatattatcatcaatggccttctgaatcggtttcatgatatagtcaccggacttagccaagccaccgaacaatacaatggcttcagggctggagaatgcaatagcatccgccaaagcttcacccaagatattacctgtaaattcgaagatctcctgtgccaatttatctccttgtacagctgcgtcatatacatcttttgaagtaatgttttctgcaggaatgttacgaagcaagctggcatccgtacgagcggcaaggaattcgcgagctgtgcgagctacaccggtagccgaacagtaagtttccagacatcccttacgtccacaaccgcaaagacgaccatcgcgacgagcgatcacgtgtcctaattcgcctgcaaaaccgtcatgtccatataccatctggccgttgataacaataccactacccacaccggtacccagtgtaatcatgataaagtctttcataccacgggcagcgccataagtcatttcaccgatagcagcagcatttgcatcgtttgtcaaagcagtggggatacccagtctttcttcaaacatggcagccaacggaagaattcctttccaaggcaagtttggagcaaattcaatcgttcccgtgtaatagttaccattcggagcaccgataccgatacctctgattttatcaacgccaccattagcaataatcaatggaagcaggcttttacacacttcatcagcgtattcttctactgtaggataaccagatgttttgattgaactgctggcaataatagttccgcgtgcgtctacaattccaaagacggtattcgttccgcctatgtcaatacctactacgtagggcttttccatgtttgaattcatgatacttttatttaaaagggttagttaatcattaagtttactgcacacaaattacgtaaagaagattgagtctacaaaatgtttttcaaaaaaagttcaacctctttgcaacttttcgtatcttgcagccgtctaatagtagaaaattattagaaaacagaatctaaataaagaaaattgtgatacaactaacaaacgtcaacaagacctacaacaacggagcgcctctccatgtacttaaaggtatcaatctcaatatcgaacagggagaatttgtttccatcatgggagcatccgggtctgggaaatcaactttactcaatatattgggaattctcgacaactacgacaccggagagtattatctgaataacgtactcatcaagaacttaagcgaaaccaaagctgccgaataccggaatcgcatgatcggatttatcttccagtcatttaacctgatttcctttaaagatgccgtagagaatgtagcacttcctttattttatcaagggataagccgcaagaagcgaaatgcacttgccttggaatatctcgaccgtctgggtttaaaagactgggcacatcacatgcccaacgaaatgagtggcggtcagaaacaacgtgtggcaatcgcacgggctttaatcacccaaccgcaaatcattctggcagatgagcctacaggagctttggacagtaaaacttccgtggaagtgatgcaaattctgaaagatcttcataagctgggaatgacgattgtagttgtcacccacgaaagcggagttgccaaccaaacagacaagattatacacatcaaggacggggttatcgaacgcattgaagataatatcgaccacgatgcctctccgttcggcaaagacggtatcatgaaataatctaaaatccaccactatacaaacattatcatgattgacatctggcaagaaatatatagtaccatcaaacgcaacaagctaaggacttttctcacaggatttgccgtggcatggggaatctttatgcttatcgtcctactaggtgcaggcaacggactgatccacgcattcgagcaatcggcttccgaacgtgccatgaactccatcaagatttttccgggatggaccagtaaatcatacgacggactgaaagaaggaagacgggtgcaactggacaataaagacatggatgctaccagtcattatttcccgaatcatgtcatcaaggccggagcaaccgtgtggcagggaggcgttaatcttagtttcggacaagaatacgtcagcctgaacctttccggcgtatatcccaatcatacagaggtagaagtcgtgaagcttttcgaaggacgttttatcaatgaaatcgatatcaaggaacgccggaaagttattgtgcttcataagaaaacagcagaaatcctttttaacaagactcataccgagccaatcggacagtttgtcaacgccggaaatgtggtttatcaggtagtaggtctttataatgataaaggaaatagcggagacagcgatgcctacattccttttaccactctgcaaacgatttataataaaggagacaaactgaataacctggtcatgactaccaaaaatctggaaacagtagaggccaatgaggcttttgaagcccattaccgcaaagtattgggagccaaccatcggtttgacccaacggaccacagtgctatctggatatggaaccggtttaccaactatctgcaacagcagaaaggttcgggcatgctgcgtatcgccatctgggtaatcggcatctttacgttacttagcggaatcgttggagtttccaacatcatgctgattaccgtcaaagaacgtacccgcgagtttggtattcgtaaggctttgggagccaaaccgctttccattctctggttgattatcgtagagagcgtcaccatcaccaccatattcggatatatcggcatggtagccggtatcggagtgaccgaatggatgaacagcgctttcggcaatcagaccatggacaccggaatgtggacggaaaccgttttcctgaatccgacagtagatataagaatcgccatacaggctacactcacattaataatagctggtacgttagccggattattccctgcccgaaaagcagttagcatccgaccgatcgaagcacttagagcagattaagactatgagaatagacatggatacctgtgaggaaatcctcattaccattacaagaaataaaacgagaagcctgctgactgcattcggtgttttctggggaatctttatgctcgtagcccttatcggcggcgggcaaggattggaggacatgatgaaaaagaactttgaaggatttgccaccaattctggtttccttgtctcgcaaagaacgggcgaggcttacaaaggcttccgcaaagggagatggtggaatctggaatctaccgacattgaccgtcttcgctcccaagtgaaagaggtggagatcattactccgtccgtagcccgttggggttccaaagccgtatacgaagataagaaatatgattgtagcgtgaaaggattgtatccggattatctccacattgaatcacaggaaatggcatacggcaggttcatcaatgaggtggatataaaggaagcacgcaaagtatgtgtcatcggaaaacgaatttatgaaagtcttttcaaaccgggagaagacccgtgtggcaaatatgtaagagtagatggcatttattatcaagtgattggcatgtcttcttccgaaggggacatgaatatacagggacgggcttcggaggccgtcactcttcctttcactacgatgcagcaaacatataatctgggaggacgaattgatgtgatctgtttcactgcgaagcatggagtcaaagtgtctgaaatacaacccaaaatggaacaggtcattaaagccgcacattatatctccccggatgacaaacaggctgttatgtgcctgaatgccgaagctatgttctctatggtcgataacctgtttaccggtatcaacatacttgtttggatggtaggattgggaactttgctggcaggtgccatcggagtatccaatattatgatggtgaccgttaaagaacgtaccactgaaatcggtatccgccgggcgatcggtgcacgaccgaaagatattctgcaacaaattctatcagagagtatggtacttaccaccattgcaggaatgtgtggaatatcctttgccgtcatggtgttgcaacttgtagagatgggagccaacgctgacggaggggacacccgttttcaagttactttcggactggcaatcggtacttgtgcccttctaatcgcactgggaatgttggcaggtctggcacctgcttaccgggccatggctatcaaaccgattgaggcgattcgggatgaataaggaagtggaacagttatctggatatgtgaggagtttagtttcaatcatcaatcgtaaataataaaattataaataaaatcatgaaaaagtatctgaaaatcacattattggtagtcattgctatcattcttgtcggaacattcgtattcctttatcagaaatccaagcctaaggtaatcacttacgaaacagttagaccggaaatgactgacctccaaaaaactacagtagctaccggaaaggtggaaccgagagacgaaattttaatcaaaccgcaaatttcgggtattatcgacgaagtatataaagaagccggacaagctgtaagaaaaggggaagttattgccaaagtaaaagtaatccctgaactcggacaactgaattctgcagaaagccgtgtgcgcctggcagaaattaatgcaacccaggcagaaacggatttcgcccgtgtgaagaagttgtatgacggtcagttaattagccgggaggaatacgagaaaagtgaagtggctttgaaacaggctcgcgaagagagacagacggccaaagacaatctggaaatcgtaaaagaaggaattaccaaaaacagtgcctctttcagtagcacgatgattcgctctaccattgacgggttaatcctggacgtacctgtaaaagctggtaattcggtgattatgagtaatacgttcaatgatggaaccacgattgctacggtagccaacatgaacgatatgattttccgcggtaatattgatgaaacagaagtgggacgtatccacgaacaaatgccaatcaagctgaccatcggagctttacaaaatctgactttcaatgccattctggaatatatctctccgaaaggggtggaaaccaatggagccaaccagtttgaaatcaaggctgcgattaccattccggattctgttcagattcgttccggatattcggctaatgcggaaatcgtattacaaaaagccaatcaggtattggcagtgcccgaaagcactgttgaatttagtggtgactctacatttgtgtacatcatgacagattcagtgcccgaacaaaagttccagcgtacacaggtgactgccggtatgagtgatggaatcaagatagaaatcaagaaaggggtaaccgttcaggacaaaatacgtggtgcagagaaaaaagataaataattgaatccgatgaaaataattcgtaaaaccatatcagcccttctgcttgccggagtcggaatcacctccattcaggcacagaacaactcttcgcaagcgtggacgctgcggcaatgtatcgactatgccattgaacataatatagaaatccgtcaatcggccaataatgtcgaagcaggcaaagtgagtgtaaacactactaaatgggcacgccttccgaatctgagcggtagtgccagccaaaactggagttggggtcgtaccgcttctccgatagacaactcgtatagtgacatcaacagcgccaataccagtttcagcttgggaacaaacgtacctatatttaccggtttgcaattgtccaaccaatattcacttgccaaactggatttaaaagctgctatagaagatttgaataaagccagagaggatattgcaatcaatgtcacttcggcttatttacaggttttattcaatcaagaattaagtaagattgctcataatcaggtcgatttaagcaaagaccagttaaaacgtattcaaggtcttcagggagtgggtaaggcatcctcttctgaagtggccgaagcacaagcccgtgttgcacaggatgaaatgactgctgtacaatcagacaatacgtacaaactgtccttactggatctcacccaactcttggaattacccacgcctgaaggatttgtactcgaaagccctaaggaagaattagagttcgaatctctcactccgccggatgacatatatacacaggcgcttacttacaaaccaagcattaaggctgcagaatatcgtttacaaggtagtcttaatagtattcgtattgcccaaagtgcgttttatccacaactctctttcagtgccggtctgggaagtaattattatacggttagcggaagatcagagagcagcttcggcagtcagatgaaaaacaatctgaataaatatataggatttaatttgagcgtgccaatcttcaaccgttttgccacaagaaaccgggtacgcaccgctcgtttgcaacaaatagatttatccttgaagttggataacagtaaaaaaatactctataaagaaattcagcaagcctggtacaatgctctggcagcagaaagtaaatacaactccagtgaagtggcagtaaaagccaacgaagaatctttccgcctgatgagtgagaagttcaataacggcaaggctacctttgtggaatacaatgaagccaaacttaatctgacgaaagctctttcggataagttgcaggcaaaatatgactacctgttccggactaaaattctggatttctacaaaggacaggtcattgaatgaaaaaaaataaagttgagtttagtatagtagttccttaaaacatatccgttggttcattcgttattatagaaagaactaacggatatgaagtattttatcgtcctagtgattgtaatgattagtaatacatttttaggagttgctaaaccaatgaagaatcaagcagaaatctattttgcgggaggatgtttctgggggacagaacatttcctgaaacaaattcgaggagtagaaaatactcaggtagggtatgccaacagtaatgttgccaatccgagttatgaacaggtctgttcaggaaaaaccaatgctgccgaaacagtaaaggtggtttatgatccgaaaacggtagatttgaatttactgctcgatctatatttcaagacaatcgatcctaccagcctcaaccagcaaggtaatgaccggggaacgcagtatagaaccggaatttattatgtagataaagaagatctccctgtcatcaagcaggcgattcaactattatccgcgcaatataaaactcctatcgtcctagaagtaaagccattgacaaatttctatccggcagagacttaccaccaggactatctggataaaaatccgggtggatactgccatatcaatcccgctttattcgaaatggcacgcaaagcgaatgcgccgaaagctaaagcgtatcaaaaagcggatgatgcaacccttcgtaaggaattgtcggcggaacaatatgccgtaacccaaaagaatgccactgaacctgctttccacaataaatactggaatgagcatcgtcccggcatttatgtggatattactaccggagaacctctgtttgtctctaccgacaagtttgattcaggttgcgggtggccaagcttttcccaaccgattcaaaaagatctaatcgcagaaaagaaagatacttcgcacggcatgatacgtacggaagtacgcagtaaaaccggagatgctcatttgggacacgtattcacagatgggccgaaagagaaaggtggattacgctattgcatcaatagcgcttcacttcgttttatcccgaaagataaaatgaaagaggaaggttatggagaatatctaccactcgttaaatagatattgaagagttacaaaagctaatcgtaactgttcattagaaaaacagaacggtggattatcccataaggaaatccaccatttttaatgtagttaaattaaaagagagagaaggagtttcacaactccgatttatttttatctgctggcagtcagcagagttgcttcattagttgccggagtagatacattcatagcccagctagcagcggattcttcaatccatttatcattccatttatagttcatataagcaaccggcatattagcgtcgttcagttcataaacgctcttttcaacagatgcgtcgtaagctctgtgagagtcattccagcgtgcatataccaaagtgatttcattagatgaataagtataatcaattttaaagtacggtatccatttttcagtagaagcatcccatttgaaagcttctttggaggacattctcttctgatcgtcataggtaaaatcatatttcatgtggcgatagagagaaccatcgagtctgtaaatcactttcgatactacaagttcatctactttttcttcattagtaatgaagttattaccctgtgccttcactgttgtattagcgattcctgcaaataccatagcaactaaaacgatcattctgaataatactgtagtcttcataattgtatattttttatttgttcaacattctgtttttgttcttctgtttattagacggatcaagcgtctcaaacggttgcaaccttctgaagtttttttcatttttcttcgttgtccgcttgcgactatagagatgcaacgagcgtgccaaaacgataactagctaataatcaaggaaatcataaaacagaacggtgtacgaaaacgaacagttgtacgcttaaaagcgaacaactaaccatttttttcgcattttcttctttctactgatgaatataactctaaaaatgggaaaatactccgcttgttgcccgaattattatctacctttgcagcgattatcatatcaagaaaaagaagatggaaacgtccaacaaaaaaagaattatcattctatcggctatcggtatcttgcttaccggccttatttgtctctttgcattccgcaatgtcattttatgccatatcgttgacaaacgaactacacgtgccgaacaaacatacggtctacaaattcattatcaggagttacgaatgaaaggctgcaatgaagtggctttacaaggactttatattgttcccaaccaacgcgataccctcctgacattacaatccgtcaatgtaaaactaagtttttgggaattgctaaaaggagaaatcgaagtacggaatgtgcttatgaatggcctggcaatcaacttcatcaagtatgatagcatagctaactacgatttcctgttctttaaacggcaacaagaagcagaaccccaacctgtcatagaaagtgactatgccaaccgtattgaccggatattaaacctcatttacggtttcctgcctgaaaacgggcaactcaggcaaatcaatataaccgaacgtaaagatagtaatttcgttgcagtcaacattccttcttttattattgagaacaatcatttccaatcaaccattcagataaaagaagatacactgcctcaacaactatgggaagccaccggcgaactaaacagaagagactatacattaaaagcatctgtctttgccccggaaaaaagaaaaatctcactaccttatattacccgccgttttggagcagaagtcactttcgacaccctatcttataatatgactaaagataagcgtgcatccaatcaactgctcctcaaaggaaaagcgagagtgaacggacttgacgtatttcataaagccctctctcctgaagtaattcatctcgatcgtggacaactctgttacgagatgaacattagcgggcactcactcgaactggatagcacgaccatcgttgatttcaacaaactccagtttcatccttatttgcgagccgagaaagagaaaggaaactggcatttcactgctgcggtcaacaaatcctggtttccggcagatgatctgttcagctctctccccaaaggattattcagcaatctggaaggcataaaaacaagtggcgagttggcctatcattttctattagatattgattttgcacaactagatagtctcaaactggaatccggactgaaagagaaagacttccgcatcacaagctatggagccacttcactctccaaaatgtccggcgagttcatttatacagcttatgagaatggaataccggtgcggacttttcctattggtccctcgtgcaaacactttacaccattggatagcatttcacccatcctaagaatgtccgttatgcaaagtgaagatggagcattcttttaccatcgcggtttcctgcccgatgccctacgggaagcattgatttacgacctgcaagtgaaacgctttgcacgtggaggaagcacgatcaccatgcaactcgtaaagaatgtattcctgaaccgtaataagaactttgcacgtaaattggaagaggcattgattgtatggctaatagaaaatgaaagattaacttctaaagaacgcatgtacgaagtatatctgaacattgttgaatggggaccgctcgtttatggtattcaggaagcttctgcttattatttcaataaacgcccttcacaactgaacacggaagaaagtattttcctggcttccattatcccgaagcccaagcatttccgcagctcttttgctgaaggcggacagttaaaggagaatatggaaggctattataagttgatagccaagcggcttgcacagaaaggagtaataagtgaaatcgaggcggatagtatccgccccgatatccaagttacgggcgctgcccggaatagtctagccggtgaaaacccggagtctagttctccttccgctgaggagtaatgagattgatataaataataaaggaataggttatcttcttgaactgctgctgtttctttcagaggaacgggaagaactttgagtgctattgcttctcgtacttccggaagaagagcgtctttctgtttgtccactagaaacattgctccgggtagagctaccgccgcttcgagtagagctcgagctaccgctactccggttagaagtggtactgctgctacgactagtagtactaccgctactgcgactggagctactacgactggaactaccgcgactggaactaccgcgactggaaccggaagagctattatttctctcggaactgttatttctattataggaaccactatcgtttcgtttacttgaactttctctcgaactgctacttgtttttccactttcacgattggaggaactggaaccagttgaacttccgcttgttggtctgcgattagagcttgaagaaccggaacctgtttccggacgacgaccagaattacgatcactttctactctattcgtattcccatttttatcaggagcaacattgttaccaggtctcccacttccggacggtgtagatggtctgacagaagtcgaaggccgatctcctccagattccggacggggacgtgttgacgtaccaggtcttgttgtcgttccgggacgagtagaagtatcaggacgagtagaggtacttgggcgagacgtaccaggacgcgttgtcgatgaacccggacgggaagaattacccggacgtgtcggtgcattatgcggacgagtggaagtattcggacggaaccggacagaaccgaaatccgaacgacgataagagtggaatactcgctgatctctcacccgatgcggtgcagaataatggttgaaattagtatatctgccccgataataactcacatggtgaaagtgtggacgataatgtgctccacaataagtacggtaatggtaaggcacaccaaaataaaacaaactgcgattcgggtaattaacataaaccctgaaactccatttccctccggttacatagattggccgatagaaatactcggcaccgaggaaccggcgatactgtgcatcactcaatacccagcgaagatcgtcgttacggatatccaacgcttcataataatcatccaatgcccattcgtaaccacgtgctacgtaatccatgatattacggacagaataaataaagtcgtaattaatttcatacgcatcattatattgctgtgtactcaagctcaattcatatgccatcttatcggtaagaaaacgcgtctccttacgtaccttgctagtgctcattccagccattacggtcatattggcagtcagaccgacagcaaagagtaaaaacagtattcgtttcataattcaatctcctatcatttattattctgatgatattcctcaataaacttacgcatctcatctttatatgcattagaaaataaaatatcgatcaccttattaaaatttcttttatcccttacataaggatacagcttcttcatcatctccacctggtcaggagtatacgaaatctccttcactattttcacacattgatttgaagtgacatcatacgttctcaacatccgatcgacaagcttcttctggtcttcattcataaccgttattttgagcttattgataaattcatcaaactccggatcagtcatcaaacgagcttcttccacttgttcatgattaggaaagacttcaacggtagtgttcacagcaggcggtactacaacggaatgcatcggtgcaggtctgccataacctttgaacgtatccatactaaccacctctctatttacaaactgaacgattatcgtcacaggttccgaagtaagtacaggcgtaccgttatcacgatggaattcccattcttccatatcaccgtcaaaacgccggaaatcaggttttcctaaaacggactctacctgcgattgagtcattccctgatatatacccatcatctgtttggtagatacatagctggtaaaacagccactgaccaatattcccaatgccaaacacagcataatatgtatctttttcataaccgtatcgtttttagttaatagtatcaacgtttaccgtaccctatgataaaatccttcatcttttccttactggagccaaatgtcagggtattaatcaccgtaaagaaagcttccttatctacaatccggggatacatgatcttcataatctccatccggtcatcatcgaatgtatatagtttggtcagttggagacattgggcagatgtgaaatcagaaccagccaatgcagcattgagcaacttcatacggtcatctttaaaaggctcattcttcatctctttataaaacgtttggaagagctgatcgttcatcaccctgttgtaaccatatcccggacgatgttctccctgttcgggacggctgggtctttccgggcgcatgttatcacgtccgtctacccatatttctgtcactcctctcccatcaaaataaacgagatctttatataatttttctcctttccatactcgctctcccgcacgggtaaagcgggtggcaaacacttcaacagtataatgtccgggatttaaattggctataaagcaggtagtagtaggtaaacatatctggttccctcccaggtaaacaagaatcggagtattcccgccatcgatacggattccgttaacagactgcgcttgtaaggagagggcagcgaacaggatgcagaaacttattataatcttacgcatagcttatctagtttttattatttatatctttaatctgatagcacaaaaatagggtgaggaaactccccaccccaatgattctctctattcgtatgtagggaaatccctattctgtttaggaatccgccaaagcaatgccatcctcatgcaaggtaatcagacgtttcttatacaagtcgcccactcctttcttaaaggttttcttgctaacaccaaacgtgtcataaatatcttccgcaggacttttatcattcaagttgatccgtcctccatgcgctttgatatagtcgagcagcgttttcgaaaaatcgtcaatcttttcaaaaccgggtttctgaagaatcaggtctaccttaccatcttcacgcacctgtttcacaaaagctttcatctccattcctgtttccaacggacagaatatttcattttcatacagcaaaccgctatacttattatctataatcgctttaaagcccaaatccgtcttctgccagataaggatattcacttctgcttccggagtatattccggcttttctttcaacagataacgttccacctttgctgaagccacaatacgataactctcttcatccaaatgcgcatggaccacatatttccgcccaacctgcattttcatcttctgctcactgaacggaacgaacaggtctttcatcaatccccagttcaggaaagctccgtattgattcacccaggagacttccagacaggcaaactgacctacctgcaccaacggagtcagcgtcgtagcaatcagtctttcatccatatccagataaagaaacacgttcaaaaaatctcctatcttacagtcttcgggcacatagcgggtaggcaacaaaatctcaccttcttccccaccatcgagatatacgccgaaatctacttctttcacgacttcaagctgattgaactttcctaattcgatgctcatattcttatctatttattgtaataagacacaaagataatctattttgaatagatctctcaaacagtcagccataacttttcgttatcgggcaaaactatttgcaatgaacaatctgctttctaatatgttaactttgtagcgacaaaaagaaaaagtaaattattcacctttaaacatataaacttatggaatttctaaccaacgagaaacttacgattgtaggagctgccggaatgatcggctccaatatggcacaaacagccatgatgatgagactcactccgaatatttgcctgtatgatccatttgccccggctctggaaggagtagctgaagaattgtatcactgcggttttgaaggtgtcaaccttacatttacttccgatatcaaagaagcgctgacaggagcttcttacattgtctcttccggtggagctgcccgtaaagcaggtatgacccgcgaagatttgctgaagggaaatgcagaaattgccgctcaattcggtaaagatgttcatcaatattgcccaaacgtaaaacatatcgttgtgatctttaatcctgcagacatcaccggattgattactttgttgtattcaggtttgaaaccctctcaagtttctacactggctgccttggacagcacccgtctgcaaaacgaactggtgaaattcttccatatcccggcttccgacattcagaattgccgtacgtatggtggtcatggcgaacaaatggctgtattcgcatctacaaccaaaataaaaggagagcctttgaccgatttcatcggcactacccgtcttccattggcagattgggaagcactgaaagtacgtgtcatccagggtggtaagcatattatcgacctgcgcggtcgttcttctttccaaagcccggcttatctttctatcgaaatgattgccgctgctatgggtggacaacctttccgctggcctgccggaacgtatgtttctaacagtaagttcgaccatatcatgatggcgatggaaacttcaataactaaagacggcgtcacttataaagaagtagccggaactcctgccgaacaggaagaattggaaaaaagctacgagcatttatgcaaacttcgtgatgaagtgattgaaatggggatcatcccagctattaaagactggcacgcattgaatcccaatattgactaatcaaacaatattagcaaaaagccgaaaaagagaaaatacatctctttttcggcttttattccaattacttacatatcacatataccccccacttagtctataaatctttcaagactccaattcaaatgactatgcaaagttggggataattcgtcaattaaaaaaatagacaaaatggggaaagtacctaaactgaagttacaggtactcaaagtgcgaaatatagtgattatcctatccaaattagtgaatggaataaaactgcgcatcgaagtttataaaatatctgtcatttttgagaagtacattcggaacaaactccttttagtacatagtttatactatgcaaagtaaatcctttaggcaaatcaatcaccgggatatgtgtaccttccaggcagaatgtacgatgacatttctcacaataaaaatgcgaatgtaaatcctgtaccacacaattgcaggagttgtcgcaaacggcatacttcaacgagccgctcccatcgtctatgctatgtatgaggtgatgagacaagaagagagcgatggtacgggatatagtcgatttatcgactgtatcgagcagtgtttccaaatcgagcaatgacaccgcacgctctgcctgcatcatcgcttttatcaccagaagccttatggcagttggcttgatacctcttctatccaacttatccaaataaatatcttcttccatctttctcctattttatcattttctgtattctgacagcattcataatggcaagtagcgcaacacccacatctgcaaagacagcttcccaaagagtagcaattccaccggctcccaaaatcaatacaagtaatttcactccaaatgccagtgatacattctgccaaataattcttcgtgtcagttttcctactttgatagcttcggctaccttcgacggctggtctgtctgtatcacgacatcggctgtttcaatagccgcatcactacccagtcctcccatagcaatgccaacatgacttagagcgagcaccggtgcatcgttcattccatcaccgacaaatgcgatccggtttgcctcatcctgccgcagctcttccagatgattcacttttccttccggcaacaggtcaccataagctttcgatataccgagcttttctgcaaagttagtaacaatactctgtttatcaccggatagtatctggatgttttcaatatttaaagcttttaaattgtcaatagctacctttgcgtcctctttcagggcatcagccagcagcagataacctgcataacggtttccaacagcacagaccacgatggtatccgttatttccagcagttcttttggataggatatatcaaacttagacagtaaccggcaattaccgaccagaaccatagccccgtctatcgttgcttccaaaccatagccggcaaattcttttgtaccggtaacagctacacattcaatgttttgttctttcgcataattcacaacagccttggcaatcggatgagtactatcactttctaccgaagcaaccagtttcactaattcttcttccgaaacctcgcctgcacttttacaggcctgtacttcaaaggttccttttgtcagggttccagttttatcgaataccactgtattgatcttagtgatagcatccagataattaccacccttgaataaaattcccaaccgggatgccgctccaattcccccaaagtagcccaacggaatactaaccaccaacgcacagggacacgaaatcaccagaaagaccaaagctctgtatagccaatcattaaatgcaaatacaaatggaggattaataagtgaataaacaaatggacacaaaacaattaacactgcaagcgctataacaataggtgtataaatgcgcgcaaacttacgaataaacaattcagccggagccttacgttcggaagcattctgaacaagctccaatattcgggcaagtgcactcttatcaaaaggtctcgttacctcgagccggataaccttatcggttacaatcattccggcaagtacttcttcacctttccgaatattacgaggaacgctttcacctgttaatgcggctgtattgaaggcagccacttcattctgcatagttccatccaatggcacccgttcgcctgcctttatttctatgatttcaccgacttttatctttttagggctttcaataacaagattgccttcccggagcactaatgctttctcgggtcttacatccaataaggctccaatattacgtttggctttatctaccgctttatcctgaaacagttctcctactgtatagaataacatcacggctactccttccggatattcaccaatatagaaagctcccaaagtagctataatcattagagtgaactcactgaaatagtctttttccctgatactttcccaggcttctttcatcactggaattcctaccggaagataggccacgatataccatatcaaggcaacagatccttcacggaagaatgctaaatcgagagcattcataattattccacttgtcagaagcaggagagagaatatcactttcccatattcatggaataccgaaacctttgcatcaacctttttttctgctgcgcatgaatgagcgccacaactacaatgtcccataactttcatcatttagttgatgcaaaggtagcaaatgatttatgcaacaaagttgcaaaaccggttttagaacatatatcccaacgagatcatcaggtttctgttcttcattcctacttctttgattacctcaacaagtccgaaatcatagcttatggcaacttgatatttcttactgaactcaaccccggcttttagtccaagaccgaagtcgaatcgttttagaccatcgtctccaaatatatcttcggacatcgagttacctcctaattccgcaatatctgcaatatcaccgtccactttcaattttgcttttccaaacagcccaacagccatataaggacctacactaccaaataatgaaaaatcatcattgacggcatatttatacccgacacgtaccggcacttccagatagtatggattaaattttatgctcgcaagtgatcctccatcaattttagcacctttcaatgtaagcaatgcagcgaagtccatataggcaccactaccattcgcatcctgcgacaatcccaactctgctttaacacctgcgtgaaaacctatcctgctatcaaaacctgtaatggtgtatttactaacattcatacctgccatcacaccccatttcagattgtcttgagcattgatactcaccgcacttatcgctaccaaagcgaataataataaggcctttttcatacgaataaataatttaattattgtttagaaattatgtgaggcaaaaataacaataattcgcataactccgagagatttagtaaaaatataaaaaataaacgatatgaatcttatgaggtatagtcatagcaaaagaaccggactatttcaaacgattttacgagatatagaacaaaaacactctgtacagagaaaaaacaaagaatgaaagactgtataacttaattaattgttatctttgcacaatcagtcgtagcacgactgtattgtttgttttaagaaaaaaagcgtttagctgatttctgtgccagtgaaaagtccaaataaaatcaacgcacatgaaacagataaatgctccttgcaatatgcggggagtgtttcctgtttgtgcgttagggcttggactccctcactggcggataggcaaatgctctccgctttttttgtgcctataaatttgcaatagatacaaacgacaaattagtaataatcacaaaggcaagtcaattcgggtggagcggcccccgaacgactacagagtcgaaaacgtaacatttagatgttactacttgcctttgaaaatataagaaacagaggctagctacacctgcaaggggaacaaatggattcatccaggagttcccctctatttttgtgaagatgtgtactattggaaagacagatattagatctacatataaatttgatgattcttattgtcaaccaaagcttttcccaaatagtataatgattatcatcggtttacatgctgacaataagccatgacaataggctgacaataaaaaattataacttctattgtcagcctgttctttaatccctttggagcaagattataagattcgttccaatgtgtcgatatactctgacttaattcccagcttgatccatgttataaactactgaagactatcattgtttacagtaacaatatcatcggcataaggaacacatacgctttataaaatgaatacgcccttattaaatgaatgctacatagccggtatctttcacttaccaagcaggtattgttccattaaagtgtcggtgttgttaactccccacggccgtgacgagatcttcccacggccgtggtaggaattcgtcacggctgtgggaagaagttaccacggccgtggagaactaaagataccggtgctttagtggaacaatactgataccctagaggaactatactggcgtgttagcggaactatataggtatattaatgaaaagatatcactttggaaagctgttataaaaatgcggcattacttcgaaacatgttcataaagcttttgtttatcaggttattaaaaggatcataagagataaaaataaggctgacagtaaaagtagatatattttattatcagcctattatcagcatctattgtcaggtgatatagtattgatattcacatacttaaataccattctgacagtttgacaataaaacaggtacaaatcaatagaaacgatcataaagtttttaatagggaagaagaactaaaggaattaaaacgaattcagcaatcggcatttgagtcgaagaaggaaaaatttgttgatagaagaatttggaaaaattatggaacctacttttctattttaagcgcaattgcggaggtaaaaatacagcaacaccaggagaaaaaaacgtaggtgactatctgaaacagtacttagtcaggcacggattacagattttctatgagcttagtaccccatcacctgtattccgtgcccaatataatatcattgttggttttcttcccggtctgtccggataaactccagaagtcgttctaccgcttcttcttcaggaatatttttctctacgcacaccttgcctttatagagactgattttcccccgtcctgctcctacatagccgtagtctgcatctgccatctcaccgggaccatttacgatgcatcccatgatgccgatcttcagccctttcaaatgtgaagtggctgccttgatacgggcaatagtcttttccaagtcgtaaagtgtacggccgcaaccgggacaagatatatattctgttttggaggtgcgggtacgtccggcctgcaagattccgaaagcagtagcatcaacgacggcatggctcaagttaccctgattgaacaggaagatgccatcacaaagaccgtcaaaaatcaaggctcccatatcggctgcggactttatctgcaaattctccgcatcatcttccgaataatgctggaagaagacaaccggattttgtaaaccttccgtcattagttgatgtaccaatgcacggtgctcacccaaacggttcggatgattgctttgggaaacaatcactacctccggatgatgtttcagacaggctatcacttcatccgtttgtgccatgtagggcataaacaggaatttaagttctgcattgcattctcccattaaaggcagctgtgcatgattgaatgcaggccaggttccgtcttctccctgccatacatccgcatcaagaatatattctactccgtcttcccgttgatcgggcaaggttcttccggcgtaaatatagtccggtgtgaattgcgggtttacctctgtcttcccgtccatgcggtcggcaataaccacaggtacatgttcacctccgatattacggacggcttttgtcttgcgacgttcgggagacagataattgaattccggtgcttccaatcccgggatataaggatgatcctgcctcaacagaacataatccaccagtttacgagccaccgggatttcagcttcaggagcttcgctcaaagatacccgaatagtatctcccaatccgtcactcaacagcgcaccgatgccaagggcggacttgatacgtccgtcttctccatctccggcttctgtcaccccgaggtgtaatgggaaagccatcccttctttttccatgacgtctaccaacaggcggacagtttttaccatgaccaccgtattagaagccttgatggaaatcaccacatccgtgaagttttcctctacacagatacggagaaactccatgcaggactctaccattcctgcgggggtatcgccataacgggacatgatacgatcggacagagagccatgatttactccaatccggatagccgtgtgattctctttacagatattcaggaacgggacaaaccggtcatggattttctgtatttcctgcgcatactcctcgtctgtatattccagttttttaaaagtacgcgcagcatctacataatttcccggattgattcgcaccttttctgcgtattgagcagccacgtctgccactttcggattgaaatgcacatcggcaaccaacggaaccatatatccctggctacgcagtccgatattaatgttcatcaagttttcggcttctttgatgccctgggttgtgaggcggacatactctccacctgcatcaacaatacgtttcgcctgttccacacaagcctgtgtatcctgcgtagacgtgtttgtcatcgactggacacgaatagaattggggccgcccaacggcacagccccaatatttacttctgtggtttctcttcgaaaataattgaatagatccattagttcgttttatattcaaacttcacttctttcagttcttcgtttgcttttacgattttctttttcagtccttccttgtaagcagcaaaagcttctgccagtttctcatcgctcaatgccagcatctggatggcaaggatagcggcattcatcgctccgttgatggcaaccgttgctacaggaatgcccgaaggcatctgaatgatagaataaagtgcgtccacaccatcgagcacggaaccttttacaggtactccgattaccggcaatgtagtgttagccgcaattacaccgggaagggcggcagccattccggcagcagcgataattactttaatgccacggttgtgggcattcttcgcaaactcttccacagcttcgggcgtgcggtgagcagaaagagcgttcatttcgaacggtacatgcatatcattcagcagctgtgcagccttctccataacaggaaggtcggacgtgctgcccatgataatacttacaattggagtcatagaataaaaattaaaagcctcttcacagccctttcacgaagagagggggttcagctacattcaacttatattagttatatttctgtttgcactatccgtttaccacggctttatacgcttcggcatccagtagatcttccaccgcttttacatccgccggcttcactttaatcaaccaaccttcgccatagggagctttatttaccagttccgggttttcttccaatgcttcattttgttcgagcacctcacctgctatcggcaggaaaaggtcggaaatagttttcactacttcaatcgttccgaaagtttcaccggcttccaacgtttcaccaacagtcgggatatctacgaacacaatgtcgcccaattgttcctgtgcataatcggtgataccaacgtatgcaatgtctccgtcaacgcgaatccattcgtgttcgttcgtgtacttcaaattctgtggaaagttcataatgattagtttttaggatttatactgttttaaaataaaaatactcgaaataagatgttactcaccggatgaagtaccaaaagggcacatatcagaccgacagcaaaaccggaaagcacttcacccagcgtgtgatgtcccagaacaatgcgtgcagagcccaatataccggcaatcaaaataaacaggcatagccatccgaccggattgtaaccgaacaaggcactgaaagaaatcaagcctccgatcaccccgcccattcctgccatgtgttcgctcaacttccatttcaggtttactgcaatgcaaatgatagacactaccagggaagcaagaatgataccagtcatataccacgggatattcaacctacgcatcatcagcaggcagaacacatacgagatgatggtcagcagaataggtacataacgcttcttacgttcactcaactcctgacgggcaaacccattgattttacgaaacaagaaaattgtaatagtaggtgtcagtatggtgaagcagtaaacgattcccaacactatcaacttatattgtatcggcatgatacgaagataagaaaacaggaataacaccagaaacgataaaaacggaatagaaaatggagtaaagaccatcgaagtgactctcgccacctgcaacatcgtcttatccgctatgatatgttctctctctctgtccactcttctttgattactagttactaattacaaattacaattctcattcttcattgttaattatccattattttcgcagtctcgccacggggatattcagttgttgacggtatttggctactgtcctgcgggcaatgggataacctttctcctttaatatatccgccaattcatcatcggtcaggggtttcttcttgtcctcgccttcaatacactctttcaggattttacgaatctcacggacagacatctcttcgccatcttctgtggtatatccgtcgctgaaaaagtatttgagcggatagataccgtaattcgtctgtacatatttactgttactcacacgggagattgtcgaaatatccaatcccgtacgttccgccacgtctttcagaatcataggtttcaatagcgattcatctccttccaagaagaaaggacgttgcaggtcgataatcgcctgcatggtaaccatcaaggtattctgacgctgacggacagcatcgataaatccttgtgccgcatccattttctgtttcagaaacatcatcgcttctttagattccttagactggttagccctgttttttgtatgctcctccaccatttccgtgaagtcacgactcatacggagttcgggaacattgcggttattgagacttacattgatggttccgtcatcatacgtttccacaataaagtcaggaactatttgttggagatttctgccaattgcttctcctaaagaagcacccggacgtggattcagtttggttatttcagtaatggtttcctggaaagtctcttcatcaatatccagtttctttataatcttctcccaatgtttacgggtgaattcttcgtaacattctctgataatcctttcttccagattcaagataggactgggagttttctcttcttcttttttccggcgaatctgtatcaacagacattcctgaagactacgcgcaccgatacctgctggatcgaagtcctgtaagatgttcaatgcttcttccagttcttcctcggtcgattcgataccggcataaatcgccagttcgtcgcagatactttccaaagatttgcgaagcaatccgtcatcatccaatgaaccgatcaggtattccaccaagtcacactggtgctctgtcaggttgcgttcacgcaactgttctttcaggatttcataaaaagaggtggagtcggaaaatggaatatcctccgcttgttcatctttcgaacggttgttctcttgcaatttataatcgggaatatcgtcttctgtcagatagtcactcaaagaatcatagtcattggcatcgctatccatgccatcctctgcattctcggtatcggaatattcattatccgtagcattctcttctttaccttcttcaagtgccggattttcaagcagttcagcatggatacggtcttccaactctactgcgggaagctccaacagtttcacgaccagaatctgctggggcgagagcgtctgtacctgctgttgcgcctgagattgtatttgacgggaaccttgtgccatattcgtttttgctttctactgtttctcgctacaaaagtaactttttaacgagagattacacagattagggagataatttttaatcctataacacaaaattcgttatctttgttgcacgaacttaaaaactaggacaaatatgtttgccaaagaaacgtatatgcagcggagagccctgctaaaaaagaacttaggctccggagtgttgttatttctcggaaatgacgagtgcggactgaattacgaagataacacattccgttatcgtcaggattccactttcctttattatttcggactttcatgtgccggactttcggctattatcgatatagatgaagacaaagaaattatctttggtgatgagttgtctatcgacgcaatcgtatggatgggatcacagccgacgttgcacgaaaaatgcgaacgtgtaggcgtaaaaaatctgatgccgtctgctgacattgtaagcgacctccatcagtgtgtacagaaagggaaagcaattcactatctgcctccttaccgccctgaacataaactgaaactgatggactggctgggtattcctcccgcacatcaggaaggttctgttccattcatccgtgccgtgatcgctcaacgcaactataaatctgcagaagaaatcgtagaaatagaaaaggcttgcgatgtaactgccgatatgcatattacagctatgaaagtacttcgtccgggtatgtacgaatatgaagtggtagctgaaatgaaccgggtggccgaatctaataactgccagctatcattcgctacaattgccactatcaacgggcagactctgcacaatcattatcacggaaataaagtgaagccgggtgatttgttcttaatcgatgccggtgcagaagtagagtcaggttatgcgggtgatatgtcgtctaccattcctgccgataagaagttcaccacccgtcagcgtgaagtatacgagattcagaacgccatgcatctggaatccgtaaaggctctccgtccgggtattccttatatggacgtatacgaactgtcagcccgcgtcatggtggacggtatgaagacgctcggattgatgaaaggaaataccgaggatgctgtacgcgaaggtgcccatgcgttgttctatccgcacggactaggtcacatgatgggattggatgtacatgatatggagaatctgggagagatatgggtaggttacaacggtcaaccgaagagcacacagttcggtcgcaaatcgcaacgcctcgctattccattggaaccgggttttgtacacacggtagaaccgggtatttattttattccggaactgatcgacatgtggaaagcagaaaagaaatttaccgattttatcaactacgagatagtggagacttataaggacttcggtggtatccgcaatgaggaagattatctgattacagaaaccggtgcccgccgattaggcaagaagattcctttgacaccggaagaggtggaagctttaagataaaaagcctcatcaaaataaaagaagaacctttcttctattcaaaatcaatagcggaagcttttcatccggatgaaaaacttccgctatttttgtcaaagtaccaaatagtccatctaaaatcacattttttctacccttcttttcccgaatcttgcgtaatattgcaacagaattaaaataattcactttttaatgatataaaaacaatgaataacaccatgaagagactacttttatctgtatggctattgtcactttccttactgtccgccgtagctgaaaactatccttataaaagcgatgtgctttgggtcaccgtacccaatcatgccgactggctttataaaaccggagaaaaagcaactgtagaagtacaattctataaatacggcatccccagggataatgtaaccgtcacttatgaaattggcggtgatatgatgcctgttgccgatacaaaaggaagtataactttaaagaatggcaggggggtgattcctgtgggcacaatgaaagagccgggattccgcgactgccgcctgaaagcaaccgtagatggaaagacctattcacatcatatcaaagtaggattttcaccggagaaacttcgcccatatacaaccatgccttccgatttcaaggaattttgggaaaaggctaaagcggaacaaaaggagtttcccctaacgtataccaaagaacatgtcgaaaaatattccactgataaaatagactgttatctcgtaaaattgcaactgaacaaacgtggacaatgcgtctacggatatttattctatccgaaaaaagaaggaaagttcccggttgtcttatgccctccgggagcaggaatcaaaaccatcaaagaacctctacgccataaatattatgcggaacaaggatgcatccgttttgaattcgagatacacggcctcaacccggaaatgagtgaagaagaattcaaagaaatcagcaacgctttcaatggcagagaaaacggctacctgaccaatgggctcgacagtcgtgataattattatatgaaacgggtatatctggcctgtgtgcgtggcatcgactttttaacatccctaccggaatgggatggcaaaaatgtaattgcacaaggaggtagccagggaggcgccctggcgttgatcgctgccggactggatgaacgggtgacagcctgtgtcgccaatcatccagcattaagcgatatggcaggctataaagccggacgtgccggtggctatcctcatttctttagaaattcggtggatatggatacccccgaaaaaataaagacaatggcctattatgatgtagtgaactttgctaaattgataaaagcagacacctatataacatggggattcaatgatgacacctgtcctccgacaaccagctacatcgtatacaatgtactaaactgtccgaaagaagcactgattactcccattaatgagcattggacttccaacgataccgagtatggacatctgctttggataaagaagcatttaaagtgaagttttaatcattccatctggatgcgggcaattcttttttcccgtaaccttttttccaggcatacgctttcctcttcctgagataaagcgtatcgccgcaatgtttcatcgcctcccaattaaagatagaatggtgacagatgatcttttcaaaccaataaagtatgtgataagtcacgaatggtaacaccatccaccaccatgaaaacagtaacgataaaataagtgctggtatcagggttaaagaaaaacattcccaatactgtctggcatgaattcggagttccatatcttcccagacttccagatatttatagcgggtaaagaaaaaccagcctaacataaaatagtgcttcttcccttttcctaagaaccactttgctaaaagactattataaaaaatcatattcacattttttttgttgcatgtagtcccttcttaacagcaaaagtaattaaaggttcaatattttaaagttttgcataacaaccataacattctttccctaaatatcactcaaatattgtttatttttgtgttcccttgcttcactacaacaaaaggtttatttgtattttctgcaaaggaaacacaattcacgaatatatcctaatttttctgcttaatatttaaagctgcttcctcctaaaaattcacgcaacaaagaagtaggcggaatttctttatcctgtaccggaacaaaatatttgataaacttcaacaatcggtaggcttcacaatattcaggacagttacgcggaacacccatcagaataggctcagcgtgtaaacgaagtacggcaaactcaaaaagtagcgctgaattaaacatgacatcagcattttcctgataagggaatatccatttgtcttcaccggcacgtacactaggccagcgtgatatggtttcacgtgcagaatatccccgataattaaagtcgcggatgatgcgacgcaacaaacggttgtcagtagttggaatccagttatggtcatccaacgaaatagtagtcaatgctgaaacataaatcttgaatttccgttcggctggtatatgcggtgtcagttccggatttaaggcatgaataccttccagaatcagaattgtattatcttctattttcagtttatcacctttatattcctttttgccaagagagaaattaaaacgtggcaattccacctcctcgccacgaagaagcgcctgcagctgttgattaaacaattccagatcgagcgcataaagtgattcataatcatagtttccgttttcatccaaaggggtttcttcacggtctacgaaataattatccaaagagatcgggaatggcttcaagccatttgtcatcagctgaatagaaagccgtttgctgaatgttgtctttcccgaagaagacgggccggcaatcaataccagttttacccggttaccgttctcgccacgatggaagatagtatcggctatctgcgctatctttttctcctgcaatgcttccgccacattaatcaagtcagtggcatgtccttcttcacaggcaagattaaaatctccggcattattaagccccatgatataactccaattcagatattccttaaaaacatccagcatcttctcctgcttcacaacttcttcgagcatacttgggttttcacgactcggaatccggagtagcaacccatcataatacttcacgatatcgaacaatttaagatatccggtgctgggaagcagattaccataataataatcaattgtatcacccaatgtataataataggtataaagagaaccggaagtttcaagtaatctcactttatcattcatcccccgctcgctgaaaacccgtaccgcttccgccgtatgacattcaatgcggtgataaggaatattttccgcaatgatctcctgcatccgttgcttgatacgcgtcacatcttcgagttcaatggggcgtccaatccgcaaattgcagaaataaccttttgaaacaggatgttccacaaacaattttccctcgggaaagagttccgtgacagccttaaacaagacaaaacaaagcgaacggacataagtacgcataccggactgatctctcacatccagaaactctacatccttattattatatactctgaaattaagtccctcggagcgattattgaccttggcactcactacttgataaggaaaattaagattaaaaccgtaataaatatccaaaagtgagcttccgatagggaattctttggaattattgttatttttgcaacatatttgtaacatctgtttcatcgagttcgttaaaaggtgaataatttgggactaatatacttataatcagattgagaacaaataaccattaaaaatattatagatggaatattctttttatgattttttaaagctcataggctcattgggactcttcctctacggaatgaaaatcatgagcgagggcttacaaaaggtcgcgggtgatagattgcgaagtattctaacggcaatgaccaccaaccgggtaacgggagttctaacaggagtgttgattacagcccttatccagtcttcttcagcaacgacggtgatggtcgttagtttcgtgaatgccgggttacttacacttgccgaatccatcagcgttattatgggtgccaacatcggtactactgtaactgcttggatcatttcaattttcggatttaaggtcgatatggctgctttcgctcttcccctcttagccattgccctcccgctcatcttttctggaaaaagcaaccgcaagtccatcggtgaattcatttttggtttttctttccttttcatggggctctcttatctgaaagcaaacgcccccgacctgaatgccaatccggaaatgcttgccttcgtacagaactacacggatatgggattcttttccattattctgttcttgctcatcggtacaatattgaccatgattgtgcaagcctctgcagctaccatggcaatcacattaattatgtgtgccaacggctggatcagcctggaactgggagcagcactcgtattgggagaaaacatcggaacgactatcacggccaatcttgccgcacttacagccaacacacaggctaagcgggcagcattggcccattttgtttttaacgtgtttggggtcatttgggtattgattgtcttccatcctttcatggatctagtaaactgggtagtagacaccttctttcaaagcagtaatccagaggttgctatttcctacaagctatctgctttccactctatcttcaatatctgtaacgtatgtatcttgatatgggctgtaaaactgattgaacgtaccgtatgcgctttaatccaccccaaagaagaggacgaagaacctcgcctgcggtttatcactggtggtatgctttccactgctgaactttccatccttcaggcacgtaaggaaatccatcttttcgcagaacgtacccaccggatgtttggcatggtgcaggatctgttgcatacggaaaaggatgacgatttcaataagctgttcagccggatagagaaatatgaaaatatcagcgacaatatggaacttgaaatagccaactacctgaatcaggtatccgaaggccgtttgagttctgaaagtaagttacagatacgcgccatgttgcgtgaagtgacagaaattgaaagtattggcgacagctgctataatctggcacgtaccatcaaccggaaacgtcagactaatcaagactttaccgagaaacaatatgagcatattcatttcatgatgaagctgactaacgatgcacttgcccaaatgattgtggtagtagaaaaaccggagcatcagagcattgacatcaacaaatccttcaacattgaaaacgaaattaataattatcgtaatcaactgaagaatcagaatattctggatgtgaacaacaaagaatatgattatcagatgggagtttactacatggatattatcgccgagtgcgagaaacttggcgactacgtagtgaatgtagtagaagccagcagtgatgtgaaagagaaaagagcttcttaacagataaaataaagaataaaaaaggagaatcagtagtatcaatacatacctgattctcctttttatatctaatagtatcttttataaaatcaattatatacgtatgattcagccaaacgccagaacaatgtagattccggaacagtagttgtacgaagcacttttgcagtcccgccttctgaggccggatttatattggcaaaaatattccatcccttattaaaagagcagttactataatagtatgatttgtcactgcctgtcaatgtaaaagaacggtcggcatactgataactcaccaatgtagcttttccggcagaagaccctttacccgaccagttggaaatagcaattcgccccacccttttatttccattaaaaacaaagaaatctcctaacgtcgccacaagagcgtccgcatcatctgaggttccggtccagtaaccacccataccattacgccggtctactgtctgaagcttttccgaaggaaaactagtgggaagtgtcattactatttgcccgttctcataaggaaagctaagagtctcaatcacttgccaatcaacacccgtcactttcacctcaacccggtcaaatgtgaagtccgcaggtatattctgtatatcttttactacaagcgtgctataatccggaacatccagagcaggaggttgctcttcattctcatcgtcgctacaaccagccatcaaaaggctgaatatcaataatacaaagattacagggtatgatagataccttagatcggttatgacggttgctctattatacataacttccgatttttgcatcaaagatatcacatttataatcagcagaataatttccaaccataaaaataaaaaatgaccgggtatatatttatacacccagtcattctcctcttaataattctctctcttggttttatccttcgtacggttcaaagtcttcttttccgactccacataatggacaagtccaatcatcaggaatatcttcaaatgctgttcctggttcaattccactttccggatctccttgttcggggtcgtaaatatattcacagaccgtgcaaatgtactttttcataacgttcgtatttttaattggttttctaaataatataacacaaatagcaagatatttgttcaacactatttttaaactaaagaaaaaaactatctttgtagtcatattatcaagctaaaacaacaatattatactatgcttatagcactattgtctaccttaatagttttatgcgcagtcctactaatcagttttttattggaacgtaggaaatgtctgcggatgcaacaacgattgttccgtgaatccagaaagttggaacgcaccagccatattgccggcgccatcttgaaaaatgtgcatgcctttatcctattaatagacaatgatttcaaggtactgaagactaactattaccaaaaaaccggaaccagaaaaggaacagaagagaaaagagtgggcgacttgttgcaatgtcgcaatgcattggcagccgaaggaggttgcggcacacatagtttctgcggctcttgcccgatacgtaccgccatacgacaagccttcgaacagagacgaaacttcacggatcttgaagccactttatccatagttacatctgataatactaccgtggaatgtgatgcagtaatatccggttcttacttccttctgaatgaagaagagaacatggtaatcaccgtacacgatgttacccgccgaaaacaagctgaaaaggagttacggctagccaaagaaaaagcagaaaaagccgatatttcaaaatctgcctttttagccaacatgagccatgaaatccgtacccctctcaatgctattaccggatttgcagaggtattaggcagtgcaactacagaagaggaaaaggcccaatatcaagaaatcataaaaatgaatgccgacctcctgatgcaactggtcaacgacattctcgatatgtcaaaaatcgaagccggaacattggaatttgtgcagacaacagttgactgtcaatcagttactttcagatttacaacaactttttcaaatgagagtcgatgacgccggaggaaatatacaaattatagcggaatcatcccgttcttcctgcatgattcaaacagatcggaaccgggtggcacaagtgctttcaaactttgccggcaacgccattaagttcacccataaaggtagcatccgcctcggctatgaaactagagataccgagctttacttttatgtcaaggataccggaaccggaattccagcagagaaattaccggatgtattcgagcgtttcgtgaaactgaataaagataaaaaaggagccggactgggactttccatatctcaaactattgtcgccaaacttggcggtcaaatcggagcggattccgtagaaggtgaaggctctacattctggtttacaattccttatcggtcatgtggtaaaccacgctaacaaattcgacttcataaaaagttttaattaaacattctatcacaattttatgttgtatttttgcggttcaaactaaacgcatgtatctgcatgagtacaaataaaaatgactattatcatttaggacttactgatgacgaagtcctacaaagcagggagaaaaatggtattaacctgttaacgccccccaagcgtccttctctctggaaactttatctggaaaaatttgaagacccggttgtccgtgtattattagtagcagccgctttctcattaattatctccatcatcgaaaacgaatatgccgaaacaatcggaatcatagccgctatcttattggctaccggaatcggtttcttcttcgaatatgatgccagtaagaagttcgatctgctgaatgcagtcaatgaagaaactctggtaaaagtggtccgaaacggacgcgtacaggaaatccctcgtaaagacatagtggtaggtgatatcgtcattctggaaacaggtgaagaaattcccgctgatggagagttgctggaagctatttctctgcaagtgaacgaatccaatctgacgggagagcctgttattaataaaactactgtagaagctgattttgatgaagaagcgacttatgcctccaatctggtgatgcgtggcactacagtggtggatggacatggtaccatgcgcgtgctgcatgtgggagatgctactgaaatcggaaaagtagcccggcagagtacagaggataacctcgaacccaccccgctgaacatacagctcaccaaactcgcaaatctaatcggaaagataggtttcaccgttgccggtctggctttccttattttcttcgtgaaggatgtagtgctatattttgatttcggttcgctgaacggatggcatgagtggcttccggttttcgaacggacactgaaatattttatgatggcagttacgctgattgtagtagctgtgcctgaaggattgccaatgagtgtcacgcttagtctggcattgaacatgcgtcgtatgctttccaccaacaatctggtgcggaaaatgcatgcttgcgaaacaatgggagccatcaccgtgatttgtacggataaaaccggtacactgactcaaaatctgatgcaagtgcacgaacccaatttctatggtataaaaaatggcagtgacttgtctgatgacgatattagcgcacttatcgcagaaggaatcagcgccaattcaacagctttccttgaagaatcaaccaatggagaaaaacccaaaggcgtaggaaatccaaccgaagtggctttattactctggctaaacaaacagggaagagattacctgcaactccgcgaacaagctcatgttctcgatcaactcaccttctctaccgaacggaaattcatggcaactcttgttgaatctccattgatcggcaaaaaaatactttatataaaaggagctcctgaaattgttttgggtaagtgtaaagaagttgttctggatggacggcaagtggatgcggtagagtatcgttctacagtggaagcacaactgttgaactatcagaatatggctatgcgtacacttggatttgcattcaagattgtcggagaaaatgaaccgaacgattgcacggaactagtttcagccaacgacctcaatttcttgggagtagttgccatctccgacccgattcgtccggatgtacctgctgcggttgcaaaatgtcagtctgcaggtatcggcatcaagatcgtgaccggtgacactccgggaactgccacagaaatcgcacgccagataggtctttggaaccctgaaactgatacggaacgaaatcgaatcaccggtgtcgcatttgccgaattgagcgatgaagaagcactggacagagtgatggacttaaaaatcatgtcccgcgcccgtccgacagacaaacaacgtctggtacaactgcttcaacaaaaaggagcagtggtagctgtaaccggagacggaacgaatgacgctccggctttgaatcatgcccaagtaggtttatcgatgggtacaggtacttctgtagccaaagaggctagtgatattacattgctcgacgactctttcaacagtatcggaaccgctgttatgtggggacgttcactgtataagaatatccagcgtttcatcgttttccagctaacgattaactttgtggcattgcttatcgttctgctaggctccgtaatcggtacggaacttccgctgactgtaacacaaatgttatgggtgaacctgattatggatacttttgccgctttggctcttgcctctattccacccagcgaaacggtgatgcttgagaaacctcgtcgcagtaccgattttattatcagtaaggcaatgcggtctaatataataggtgtgggctctatcttcctcatcgtattgctcggaatgatttattatttcgaccacagtacgcaaggaatgaatgtacacaacctgactattttcttcaccttctttgtcatgctgcaattctggaatctgttcaatgcccgtgtattcggtactaccgattcggcattcaagggactttccaaatcgtatgggatggagcttattgtactggctattcttgccggacaattcctcatcgtacaattcggtggagccgtattccgcacggaaccgctcgactggcaaacctggcttcttattataggcgtttcgtccacggtgttatgggttggagaacttgttcgccttgttcaacgtattattcacaaaaaagacagaaatgaaaagtaaaggaataaaaaaccttcttattgatttgggtggtgtacttatcaatctcgaccgccaacgttgcattgagcactttcagaagttagggctccaaaacgtggatgcattgctggatatccagaaccaggacggactcctgatgcaacaggaaaaaggattgataacacctgccgaattccgtgacggagttcgtaaaatgataggcaaagcagttagcgacaaacaaatagatgcagcctggaatagtttcctggtagatatacccacacaaaaactggatttattattaaaattacgtgagaaatatgtcgtctatttattgagcaataccaaccaaattcattgggaatggacatgtgctcatttgtttccttaccgcacctttaaggtggaagattattttgaaaaaacgtacctctcttttgaaatgaaaatggccaagcccgaaccggagatattcaaggcaatcatagaggatgccggtatcgagccgaaagaaacgctttttattgatgactctgaaatgaactgtaagacagcccaaaatttaggaatttctacctatacagcgaaagtaggcgaagactggagccatcttttcaacctcaaataattttagagatatgcagattatacgtgacacatcggcaattaccccggaaccctgcgtagctaccatcggtttctttgatggagtacatgcaggacatcgctatctgattcagcaagtgaaagagatagccgccgccaaaggtctacgctctgcattggttacttttcccgttcatccccgaaaagtgatgaatgtggagtatcatccggaacttctgactacccccgaagaaaaaataagtctgcttgcagacatcggggtagactactgcctgatgcttgatttcactccggaaatttcccggctcactgcccgggagtttatgacacagttgctaaaagagcgttatcaggtaaaatacctggttatcggctatgaccatcgtttcggacataaccgcagcgaaggtttcgaggattatgtacgttatggaaaagaaattggcatagaagtaattcgcgccaaagcgtataccagcaatatagaaatagggaacgaacccaacattccggtgagctcttccctgatccgcaaacttcttcatgaaggagaagttagcctggccgcccattgtctgaaatatgaatatttccttgacgggatcgtagtaggcggctatcaggtaggcagaaagataggtttcccaacggccaatttacgggtggatgatcccgataaactgattcctgccgatggcgtatatgccgtatgggtaacatttgacgggaaaacgtatatggggatgctgaatataggtgtccgcccgacgattgacaatggtccgaaccggacgattgaggtgaatatcctccacttccattctgacatatatgataaattcatccggcttacttttgttaaacggacacgtcccgaactgaaattctccagtatcgacgagttaataacacagctccataaggatgctgaagagacagaaacaattcttaaaaaatagattcttatgcaaaagtcatttatgagcatctctttggtggtaatagctatatccatgttagctatgtttatctatagtttctttaccactaaataaaaaaccatgaaaacggctatcaaattagtattaatagaccttctcattgcacagattgtcgcccctatcctgattatgattccctgtacgatctatttgttcgtcaccacgggaaatctggataaagtcactctgacgcaaatgattatgatcccggcacaactagccggacagattatgatgggtatttatctatggaaagccggttatatcagtaaaaagaagacaacatggtcacccgtatcagctccattcctaatttgtagcggactagctattctcaccggtggttttctggtatccgcactgatgggactgctagactggatacccaacatcatggagcaatctttcgacattctccaatccggttggggcggtattcttgcaatagctatcatcggtcctgtacttgaagaactgttgttccgcggagccattaccaaagctttgctgcaacaatacaacccgacgaaaggcatcctcatttcagcacttctattcggtgtctttcacatcaatccggcccagatacttccggcatttctgattggtatcctgctggcatggacatactataaaaccggcagtctgattccctgtatactcatgcatatattgaataactccttagcagtatatcttagtatcaaataccccgaagcagaaaatatggacgacctgattaacggtaccccgtatctcatcgtcctattcgggtcaatcctcctgtttatcggtatcatactgaccatgaaccacctgacttcccaaaagcagcaataaaaaagggaagtttttacttcccctctttcgctttgaatgctaatgcatacattcgtatttgttttaccatcgacagcaaaccgttgctacgcgttggcgatagatgctctttcagtccgatcttgtctataaaataaagatctgcatttaagatttcatcaggagtatgtccggaaaagactttaatcaacaaggcaataatcccctttacaatcaaagcatcgctttctgctttaaaaacgattttaccatccacatcatccgcttgaagccataccctgctctggcatccttcaatcagattttgttccgtcttatatttttcttcaagtggttcctgctcattccccagatcaataagtaattgataacggtccatccaatcgtcgaagtcactgaattccgcaatcacttcatcttgtagttcattaattgacattatagtaattatttaattagacaatataccaatgtgcgaatagcagatgccgtatttaaaaccggcatatcaatctatcaacaccttattatattatttctcaattctattatttctcattataaatcacttccaataccgtctgaccgactgctttcaacgtattcttatcaatatgttccatattgtcattgacagtatgccatgtcggggtaaaatcaccttcctgattgtagggaatgatatcgatcgttttaatacgtgccagacgatttatgaacagatggtcgtctgttacaaatcctccgtttccatccatgaaagtctttccgtaacccgctttctttgccgctttccaaaccttcttatttatgtccggagcaaattcttccgaatacccttctttcataaacacactgccttcacctcctaccatatcgagcaggataccaaaacgtgcattatatccttgtacatgaggattacgtgcccaatactgcgatcccagacaccagaattcctccttatgctttcctgtataaaactgtggcgcaccatagtcctctgcatccaacagaatgatatcaatccccaattccggttgttgctgattgaccagacgagctatttcgagcaaagctcctaccccactggcaccatcatttgcacccagaatcggagttttatggttcttctcgtcaggatcgttatcagcccatgggcgtgtatcccaatgtgcaaacaaagcgattctctttttactttccggcttataagaaccgataatgtttctcgctttcaacagcgtaccgtcataagcaatcaaatcagcatattgattagtcacttgagcaccgaaagcctctaattgactggcaaggtaattgccacaggcaacatgttctttagtgttaggaacacgaggtccgaaatctacctgattctttacatacaaataagcactatccgcatcaaactgaggtacattcacaactgtcttttcgtcttgttcactcgtactatttgccttgttacctccaccgcaagagaatgctgataataacaaaaaggcactcattaatactatcatagttttctttttcatcgtccttttatctattaaagcctcaaaattagtcattttcaccacagcatcgttcagatggaatggattattaacatataaactttagttccacatttttctttcccaccacaagctctacttttgcaccgttgataagcgggagattatgagtcacatgccccaccgggaaattgaaacagacgggataatcatactcttttactaaatctgccaaagtagcatacagttccttgcccaacgaacagtcttcttcatattctgtaaattgaccgataatcaatccggacagtttttctaacacgccccccagtttcaaattatacatcatacgttcgatggcatgcggacgttcgctaacatcttcaataaacagtatagtgccttccgccggaatatcataaggagtgccacgcaaaccgtaggctaccgccatgttaccgccatgcaaaacgccttgtgccgtcccctgcttgttcagtttatgcttctcgcacatgtaagaaggaatatttcccaatagaatatccttcagatagttcgcacaaagatcgtcttccggttccaccgtaagatgacgtgccatcaatgaatgaagggaagcatatccatttttctgaaacagattgtgcaaagcggttatatcgctaaagcccagtaaccatttcggatgttcacaaaaggccgtaaaatcaattttatcgatcaaatgtaccgccccgtaccctccacggctgcaaagaatagccttcactttagggtcgtccatcgcatcctgcaaatctttcagccgctgcttgattgtcccggcatatcttccggatgaacttccggcatgctttcctatagccactttcaagccccatgattccatccgtttcttggctccttttaggaattgttggtctatcttactcgaaggtgatacaataaccactttatcacctttctgcaaaaagggaggaaattgaatatccatatatgttcttattttattgactttcgttgataaaaacgcacccagtccacttccatttctaccggaagatcctcgggagagactgctcccacccacgaacctcccaactgcatatcaatcagcagataaaagggctgagtaaaagggaattgtccttcttctttcgtttgtatgcgggggtaagtaaacgtatgtacatcattgacataaaatgaaagactgtccggatacatttcgactgcaaaaatattgtagcggtcagggtgaatcactcccgtagaatgtgataccggatgatccttgatccccagcgtataagtgtaatgggaatgaactgtctgataagcaatagaatcgttattcaaacgttccatgatatcaatctcaccgccggatggccatgccgctccttcaggcaacatccagatggcaggccatgctcctcccgccgcattcaacttggcacaaatctcaatacgcccgttcgtaaaagcctttttgccttttgtatacacaccgcctgtcaaataaggggcagtgtcattgcgttgggtatgattggcaatacctctcaacaccagtttgcctttacgcatggcatagcaggaatcaaagtctgtcatatagttattccagtctgacttacctcgtggaatcttgctccagacctgtgaatcgaaactctttttctgattaaagttctcttcccagatcaaagaccaaccggaagacgtcttgctgcttttacaggaaacaagcgtccaacaaaggagaattaagctaagaaataatagatttttaaactgtttcatggtgcttttattttattgggggatttatttgcaaaaatacaggaaaaaacggttccatgcacatccaacagccaaaacaaataaaatatagcaaaatgttacataatggatgtaatttttcgggttataatcattatttttccaatcatttttctgatatttgctaaaaatctaacgttatggaacctattctaaattttgcccagttaacggctcatcttaaaaaactaaaccatagaaaacgaattgccgtggtctgtgcgaacgatcctaacactgaatatgccatctcccgtgctttggaagaagggattgcagaatttctgatgattggagattctaccattctgaagaaatatcccacgctcaaacaatatcctgaatacgtaaaaaccatccacatagaaaatccggatgaagcggcgcgcgaagctgtccgcattgtgcgtgaaggaggagcggatattttgatgaaagggattatcaatacggacaacttactgcatgccatactcgacaaagaaaaaggtttgttaccgaaagggaaaatcctcacgcatctggcagtaatggaaattcctacttaccataaactgcttttcttctcggatgccgccgtcattccgcgtcctactttacagcaacgtatagaaatgatttggtatgctatctgcacctgccgtcactttggtatcgaacaaccgcgtgtcgcattgattcactgcacagaaaaagtgagtgccaagttccctcattcactagattatgtgaatatcgtagaacttgccgaagcgggagaattcggaaatgtgattattgacggcccgctggatgtacgtactgcctgcgaacaagcaagtggtgatattaaagggattgtatctcctatcaacggacaggcagatgtcttgatattcccgaacattgaatcgggtaatgcattctacaaatccgtctctttgtttgcacaggcagaaatggcaggattgctgcaaggtcctatttgccctgtagtacttccatcgcgtagtgattccggcttgtccaaatattacagcattgcaatggcatgcttacaagtgtcaggagattgcaaatgcagaaaacaagtcagccaagtcaccggctcatcattctaaattcaccactaaaagcctactattcatgaaaattctggttatcaatcccggttctacttctactaaaatagcagtttacgaaaatgaaactccgctgtttgtcagtaatataaaacattctgtagaagaactatccgcttttcccgaggtgatagaccagtttgaattccggaaaaacctggtgttacaagaattggaaaacaataagatacctttttcttttgatgcaatcatcggacgcggcggtttagtgaaaccgataccgggcggagtgtatgaggtaaatgaggccatgaaacgtgatacagtgcatgctatgcgtacccatgcttgtaacttaggaggattgattgccagcgaactggcctccacattacccgactgtccggctttcattgctgatccgggagtggtggatgaactggaagatatagcacgcattacaggttctcccttaatgccgaagatcaccatctggcatgcattaaaccagaaagcaatcgcccgccgctttgccaaagagcagggaacccaatacgaaaatctggatttaattatctgccatctgggaggtggcatctctgtcgcagtccatcaccacggacgagccattgacgccaacaatgcattggacggtgaaggtcctttctcaccggaacgtgccggtacacttcccgccggtcaactgatcgacctatgttttagcggtcaactcaccaaagacgaattgaaaaaacgtatctccggacgcgccggactgaccgcccatctaggtacaaccgatgttcccgccattatacaatctatcgaagaaggagataaaaaagcggaactgatactggatgccatgatttacaatgttgcaaaagcgataggagccagtgccaccgtactttgtgggaagatagatgccatccttctgacaggaggtatcgcctattcggactatgtgatttcaagactgaaaaaaagaatctctttcctggctcccatctatgtttatcccggagagaatgaaatggagtcgttagcatttaatgccataggagcactaaagggggaattgccgatacaaatctataaataggcgggcgcacaaaaaggctattcagttaccaatcaccaagcaatctgatagtttctgtttctaattggaaacggctaactgtacagcatcattcacaatgcctgctaatataaagtcttgagcacataaatggttcgaccaaaaagaacactaatacaaataataacagtaaggtatatttgtctatttcacatagatagttgaataacatagtaaaaaagtacttttgcgatagtttctttagcggggttaataaaaaaagcgcctattagccatcgcattaaccacgattttaaccacgaccttaaccacgaagctatacctttgccatgtctcaacccgttggaacattcaacattggcaacacatgaaaacgctgtgattacttcgcaagctataaactcaaaaagaaaattatgaagaaatgttggttattatttttagtgcttagctgcacgcttcttgcccagtccaaagactggacacaatacgttaatccgttaatgggaacacaatcatcttttgaattatcaacaggtaacacctaccctgccattgcccgcccttggggaatgaatttctggacgccacagaccggaaaaatgggagacggatggcaatatgtctatacagccaataaaatccgtggattcaaacaaactcatcagcccagcccatggataaacgattacggacagttctccattatgccgatggtgggtaaacctgaattcgacgaagaaaagcgggctagctggttcggacacaaaggagaagaagcaactccttattactacaaggtgtatctggccgaatacgatattgtcacggagatgtctccgaccgaacgtgctgttctcttccggttcactttcccggaaaacgcacattcgtatatcgcagtcgatgcatttgacaaaggttcttttattcagattatcccagaagaaaacaaaattatcggttatagtacacgcaatagcggaggagttcccgaaaacttcaagaactattttattattcaattcaataagcctttcacctataaagccactgtaaataatggaaatattcaagaaaatgcaaccgaacagacaactgaccatgcaggagccattataggttttaaaactcaacgtggagaacaagtacatgcacgcatcgcctcttactttatcagcttcgaacaggctgcaagaaatatgaaagaattaggaaatgacaatctggagcagataaaacaaaagggacagaaagcatggaaccaagtactgggaaaaatcgaagtggaaggaggaaacctcgatcaataccgcactttctactcctgcttataccgttcgttacttttcccccgaaaattctacgaactggacgaagccggaaaacctgttcattacagcccttataacgggcaagttctaccgggatatatgtttaccgacaccggattttgggataccttccggtgtcttttcccattactgaatctgatgtatccgtcgatgaataaagaaatgcaggaagggctcatcaatacctacaaagaaagcggattcttccccgaatgggccagccccggacacagagactgcatgataggaaataattcggcttccgtactggcagatgcttatttaaaaggtattaaagtagaagatgtgaaaactttgtacgaagggttaatacacggaacaaagaacgtacatcccaccgtatcttccacaggaagacgcggatacgaatattataataagttaggctatgtcccttatgacgtaaaaatcaatgaaaacacagccagaactttggaatatgcctacaatgactggtgtatctatcaattagccaaagaattaaagcgaccggaaaaagaaatacagctctttgccaaacgggcgatgaactataagaatgtattcgataaagactccaagctcatgcgaggaaaaaatgaagatggaacattccaatctccattctcaccattgaaatggggagatgcatttaccgaaggaaacagctggcactactcatggtctgtattccacgatccacaaggattaattgacttaatgggaggaaaagatatgtttatcactatgctggattctgtattttccgtacctcctgtctttgatgagagttattacgggcaggttattcatgagattcgtgaaatgacaatcatgaatatggggaattacgcgcatggcaaccaaccaatccaacacatgatctacctatacaactatgccggtcaaccctggaaagcgcagtattggctacgccaggtcatggatagaatgtacacaccgggccctgacggatattgtggagatgaagataatgggcagacttcggcatggtatgttttctccgcattaggtttttaccccgtatgtccgggaaccgacgaatacgtcgttggagctcctctttttaaaaaagcaaccttacatcttgaaaacggtaacagcctcatcatccgtgcaaccgataacaacaagaagaatatgtatattcaaacaatgaatctgaacggcacagaatataaaaagaactatctacgccatgaagacttattaaaaggaggaaacattaacttccaaatgggaagccagcccaatttaaacagaggaacggaagaggaaagctttccttactccttctctaaagtcctaaaaaagattcgttaaattcataaaaaacaagagactgtttaactaagtctcatgttgataagtttgcctctattatgggaatccatagcagaggcaaattttattcttcaagacttattagggatattcattaaaaggaaaaagtgatctccttattcatcaacgtttcaaaaatcagaaaaagatagaggagccacacaccttatagcaacatgtatgctacttgtctcttaagaaagagttacctcctccaataaagcaagctcccaactacgccaaacaatagtaattaacttcaactcacctttcgccctggcttctgccactagttcgtcttcactataacgaagcaactgaccacgtgcctcatcggcaaggatacgtatttctttttccgaagcaccggcttttgcatatttcacctcaagcagataggtgaaaggaggcagtacaggaaccgacggactaggtttgaagaagaaatctgcaaaacccttattcaattcgtattccggatagagctgataataacgatacattcctaaataggcaagcaagaagcctttaatgtgcgcttcaccttcaatatattcacggatacgactttgctcacgaacagcattggcgataaaatcgaacaaaggtttccagtctcccctgaaagccatattctcaaataaagcactcatcctgttcatgtcaattttaaagatatcatgcttgatgtagccttgtatcaagaaattaaacagttgttctcttacaaccaaattcggtacatgtaaaatgggtcttcccaccatgtccacacctttgatggaaagaagtccgaaatagaataataaagacttgaaattactggggtccgtcatctccaatgcagagaaatgagtaacgatgtcagtagtgatttctccttgctcggctatttcctttataacggaaaaattctctcccaacccgtgatctagctttatcaagtatgccaacttgttaaagtcagtgcgaatattgggatctacgatttcttcaggcttttccccatgcaaaacaaaagacttcataaaataaagtaccatatcagaattaaacatacagtccaccaatctacttctactaaagcaataattgtcataattaggtttcatcatgacaacagtttcatctacagattgcatcaacactccttgttctttataataagtcagcatttcacgcaattctttctcactaaaaccaactaaatcattaaaccaaggatcagtcgttatattggttccgatgttaaagccactagttacatcatccatcgtcaccggactcactccggtaataaacaaccgttcaagagcagctccggttccggtagtggcagattttatcacgttaaagaagccacgaataaaaccttcgccatgcgttgctttcctgtaaaactccgtaccgtaagttgaaagaatggtattggtgaaattatcgtattcatcaataagtaaataaatacgaatatttttcttacgggtagcataggaattaatcgcagacagaaaagcaccgggttcttcttgtattttctcatcaagaacatcccaaatttcttttcctaacaaatcttcatacttaaagacaaaatctttaagtttgctacaacaatgtagcttaaacgatagttctacttcgttgacattggaactcacttccgaaaaattaaatcgcatgatgagaaactgattgtgaagcttcgtcggatgctgacctatgtatagctgaccaaacaactcgtcaaactgttcagcatgatttacgtcataataggcctctaacatagccaaagtcagactcttcccaaatctacgaggacgtatcagaaacagataaggcggttgcatctctattttttcaatgaacattgtcttatctacataataataattctctttctgaattcggctaaaatcagttattccgtaaggtatttgtttcatcatattgcgattcctttcaatttatctgtctcttatttctgcagacttttttcaatattctgcaaacggcgttctaatgctgcatacttttcatccttttcttttaaaagacgctcgtagagttcagtgattttgtcgataggattgaagttgttaactcgactatcattaatactatcttcggtatcagacttaactatacccatgctgatgtttgccccacctgcactttgttctgaattattcaccgtattattttcaaacaccaccgtctgtgcatcctcctccaaagtcttgagataatcgaaagggacattcaatgcacgtgcaaagcgttgcaacatctcatcatcaatcaccttcatcttctcatatttagaaacagcaggttgtgagagatgtactaattcactcaaaccctcctggttcatattcttttcaatacgggtacgacgtatattgcgtccgtgatggactctcccaattgtcaattcttctgtttccatttttattttctttctttttaaaatccaacaaatatacaaatgaaaagtttcgctcgaagcaaatatacgaaaaaaacgaatagatgtgataatatggataaaaggaatattacaacctgacaaatagaataaaatgaatacttcaaacagcgcataatgtgttaaattatcacgaactttaccgcacgaaagggcaacaaaacaaaagagcaagtgaagatgaaaagaatattgacaagcaaagaatacaggttcataaaagggctcaaagaattgatgactaaatacaatgcagtgatctctacagatgcacaaggaaaaattgagattgttgtgaatgaagacgacgaatcatttgattttgaaacagaaagcacgatctatttaggagaatgtttttcggatgatgagctaaatgaattactggaaaagaacttagcacacataatacgaataaaagaggagtataaaacaaacttgtaaacggatttatataattgaaaaatcattaatccaaatttctatataaacaccccaccagatttctttagaaccaacggcctcttccttttaaaggaaggggtcgttcctttaaaaggagtgaagctttggttttaaagcaagaaaaacgaccttattaactggtatatttgcctgtatcataaactttttaaataaaaaagctctttcaaagaaatttttctcatatctttgcgacgtgttaagttaataaattgattaaggtcgatttttgactgtttcgaatcgggaagtatgggggtactttccgattcttttttggggaggatataataaggtgtctttcatctttttaaaggttttaataaactgaataaatctaatatatactaactctatatataaaacagttcagctccggatgatactaataagaaatcttattttttaagatatacagaaatcatctcctgtaaaacctagttttaggcggaaacctcattcttgtttcataaacgaactatttcaccacagaggacacggaggacatagagttttcagagttctagtttagagataattatagcctctgcgtcctctgtggtgaaaaggctaaaagaagtatgctgatagaaaaaaagaagaaggtgtgtcaaaatgcacaccttctgttttttacgcacaaagccccgactttcacaagctggggctttgttattacctaaagattttgtatctttaggcataagaatttcactatgacaaagatacattttcgtccttacaatcccaaccaaaccgttctttttcctcaaagaattgatgaggatattgcagaaaacgatccggtgcgcatggttgacgccctggttgagggcttgaatcttgaaagtttcagaaagctgtataaggaatgcgggcgcagcccttaccaccccaggatgatgctcaaggtcattctgtatgcctatatgaacaacatctactcctgccggaaaattgaaaagctccttcaccgtgacatccattatatctggctggccggatatgagaaaccggatttcattaccatcaaccgtttccgcaaccgggtgaagaaggaaatcaacgaggtgtttacgcaaaccgtagttcttctctcttccaaaggcttcatcagcctgaatgtggaatacattgacgggacaaagatcgaatccaaagccaacaagtacactttcgtctggcgaaaaacggttgagcggaaccgtgaacgcctgatgaagaagatacatgtcctgttagggcagatagacgatgtcattgcccgggagaagtcatcagagaacaatgaggaggttgggttcactccggccatgctgactgaaatggcaggagaattgcgtcatgcactggaacaggtttccgagccatccgcgaaagaggaaaagactgaactgaaaaagaaacgcaaacagttgaaggaactggaagaacacagggacaaactgcaggaatacgactgccatctggaaacgctgcaagagaggaattcctattccaagacggacaaggacgctacttttatgagaatgaaggaggatgccatgcgcaacggacagacgaagcccggttacaaccttcaaatcggcaccgaaaatcagttcatcaccgattttgcactcttcccgaaccctacggatacactgaccctgattcctttcctgcaatctttttcaaacaggtatgaccggatggcccatacggtggttgctgattccggctatggctccgaagagaattaccgcttcatgtccgaaaacggcatggaagcctacgtaaagtacaactatttccacatggagcagcggccgagattcaaaccggacccgttcaaggccgaaaacttctactacaatgaagaacatgacttctgcatctgccctatggggcaaaggatgcggaggataggcaccaggaatgtgaaaaccgcatccggatatgtcaacgaaaatgcacggtacagagctgtcaggtgtgaaggctgtcccctgcgatgccgctgttttaaagcaaaaggaaacaggacgatagaactgaatcataggcttagacaatacaagcggagagccaaagaactgctctgctctgagaaaggactgaaacacagagggcagagatgcatagaaccggaagccgtgttcggacaaattaaaaacaatatgaactacaaacgtttccgacattttggaaaggacaaggtcttcatggactttgccttcctagccattgccttcaatataaaaaagatgtgtgcaaaactgacaaaaaagggtatgaactggctgattagactgttttatgagcttacaactgctgtttttagatgctgggaacacataaatcaaagaaatcttcaaaagatcgcagcttaaagaaagtgaacagatttgtatagtgatgaacaaaaaaagaggtgcatcgtgcattacgacacacctccttcattatatatagaagctatcgctttcttacttcttttccggtcttggcaacaaaacctttcttgaaagtttgaatttgccagttttcggatcgatatcaatcagttttacctcgatttcatcaccttctttgattccggcttcttctactgtttccagacgtttccagtcaatttcggagatgtgcagcaaaccatccttgcccggcaagaattcgataaatgcaccataaggcataatagaacgaactttacctttataaacttcgcctacttcaggaacagcaacgattgctttaatcatgcgcattgcatcatcaatacatttcttgtttgttccggaaacttcgatgcgtcccataccatcaatttcttcgatagtaatcacagcaccagtttcttcctgcataccttggatgatctttccaccagggccgatcacagcaccgatgaattctttaggaattgtcatcgtttcgatacgtggagcatgttctttcaggtcggcacgtggttcagcaattgtttcagtaatcttattaaggatatgcatacgtccttctttagcctggttcaaagcacgttccagaatgtcataagacagaccgtctaccttgatatccatctgtgtagcagtgataccgtcttttgttccggtcaccttgaagtccatatctcccaagtggtcttcgtcacccaggatatcagacaatacagcatatttttcttcgcccggattcttaatcaatcccatagcgatacccgataccggtttcttgatcttcacacctgcatccatcaatgccaatgtgccggcacatacggtagccatagaagaagaaccgttagattcgaggatatctgaaaccacacgtactacatacggatagtcagcaggaatctgtcctttcaaagcacgccaagccaagtgaccgtgaccgatttcacgacggcctacaccacgttgtgcttttgcttcgcctgtagagaaaggagggaagttatagtgtaacaagaaacgttcttttccgtgttccaaaacatcgtcgataatcttctcatccagttttgtacccagagtaacagaagtcaatgactgtgtttcaccacgagtaaagatagcagatccgtgagggccaggcagaggacctacttcacaccagatcgggcggatttcggtagtcttacgaccatccagacgcttaccttcgtcaaggatagaacggcgcatggcctctttttctacatcgtggtagtaacgatcgatcaatgcagccttttcgtccaattcttcttcagagaattgagctttgaattcttcgcggatcgcttcgaaagcagcaaaacgttcgtgtttgttattgtttccggaagcagcaactgcgtaagccttgtcgtaacatgcttcgcgaacagccttgcgcaagtcttcgtcgtttacttcgtggttgtattcacgttttacagtttttccaacctcttcagtcaactccatctgcgctttgcaatgaatcttgatagcttcgtgagccactttcattgcttccagcaattcagcttcagatacttcatgcatttcaccttctaccatcatgatgttctcataagtagcggctaccatcaagtccatgtcagctttttccagttgttcaaaagtaggattgataacgaactgaccgtcgatacgtgctacacgcacttcagagatcggtccgttgaaaggaatatctgaaacggcaagtgctgcagaagcggcaagtcctgccaatgcatccggcatatccacaccatcagcagaaaagaggatgatgttcacatatacctctgcgtgataattatcggggaataaaggacggagagcacggtctacaagacggcaagtcagaatctcataatcagaagctctaccttctcgcttggtgaaaccaccagggaaacggccgaatgccgcaaatttttctttgtactctacctgtaaaggcataaaatctgttccgggaactgcatctttagcggcacaaacagtagctaacaacatggtgttgcccatgcgaagcattacagaaccgtctgcctgttttgccaactttcccgtctcgagtgtgatggttcttccatcaggtaactcgattgtcttaacaattgggttaatcataaaaattgttttatctatactttttctttcaaaattcctgcaaagatatacatttatcgtggtaatcaggtggaaatgaggtaaaaagttagtggtgaactgattttttttcaaaattaggatgaagaacccggcaaaatgctttgactaatctcgaaaagaagtatatttgcatctcgttaataacacacactatatgaaaaaggttacttttgcagcgctcgccgcacttactattactgcttgtagttccggccctaaattccaggtgaacggggatgtatcaggagccgacggtaaaatgctttatctcgaagcttccggtctggaaggtattgttccgctcgattcagtgaagctgaagggggaaggtacattcagtttcaagcagcctcgtcccgaatcacccgaattttatcgtttgcggattgacgacaaaatcatcaatttttctgtagattctatcgaaacgattcagatcaaagctccgtatgtggatttctccactacttacacggtggaaggttcggaaaacagcaacaagataaaagagctgacgctgaagcagatccgccttcaaaaagaggtggacgacttgctggcagctttacgcagtaacagaatggggcatgatgtatttgaagacagtctggcaacgttgctcaacaattacaaggaagatgtcaaagtgaactatattttcgctgctcccaacacggcagccgcttactttgccctgttccagaaactcaataattacctgatattcgatccgttgaacaataaagatgatgtgaaatgtttcgctgctgtcgctacgagcctcaacaatgcgttccctcatgccgtacgttccaagaacctttataatattgtaattaaggggatgaagaacacgcgccagccacaggcgaaagcattggaaattcctcaagagaaaatagtggaaaccggcattatcgacatcgccctgcgtgacgtgaaaggaaatgtgcgcaaactgaccgacctgaaaggaaaagtcgtattgctcgatttctctgtattccagtcgcctgccggttctcctcacaacctgatgcttcgcgaactatataatgaatacgcaaaacaaggactggaaatatatcaggtatctctcgatgcggacgaacactactggaaaactgcggcagacaaccttccttgggtttgtgtacgcgatggaaacggagtgtattctaccaacgtagctgtatataatgttcgtcaagttccatctatctttttgattaaccgtaacaacgaattaaagcttcgcggcgaagatatcaaggatttggaagcagctgtcaagtcattgctctaagttgttataatttagcatatttcatttaaatatgttacatagcatcttttttcacttgacacgtatcacttaaaagtctatctttgcaaagaaataatgataagagggttccaacatggctcatgttggaattcttttttgtttatatgaccatttaaaacaattaaaggaggaaaacatcatggcttatatgtcagaagaaggttacaagaaactgatggcggaactgaaggaactggaaacagtggaacgcccgaagatctctgcggcaatagccgaagccagagataaaggagacttgtcggaaaatgcagaatacgatgccgccaaagaggcgcagggtatgcttgaaatgcgcatcaacaaattgaaagctaccattgcagacgcaaaaatcattgatgaatctaagctgaaaacagattctgtacagattttaaataaagtggaactgaagaatgtaaagaacggtatgaagatgacttataccatcgtttccgaaagtgaagctaacctgaaggaaggaaaaatttccgttaacaccccgattgcacaaggtctgcttggcaagaaggtgggtgatgtagccgaaatcactgttccacaaggtaaaattgcactggaagtagtaaacatatcaatttaacgtaaaggcaggtctccatgtgaggcttgccttaatttatcaataaaagttatggcaacaatattcagtagaatcatcgcaggagaaatcccctgctacaaggtggcagaaaacgaaaagttttttgcttttctcgatatcaatccattggtaaagggacatacattggtagtgcccaaacaggaagtagactatattttcgatttgagcgatgaagacttggctgctatgcacgtgtttgcaaagcaagtagcctgtgccattaaaaaagcattcccttgccaaaaggtaggcgaagctgttatcggactggaagtaccccatgcacatattcatttaattcctattcaaaaggaatcggatatgttgttttcgaatccgaaactgaaattgtcggatgaagaattcaagtccatagcgcaagcaatcaactcctctctataaaacatgatgatgaaataatgaaaggcattccgtgatggaatgccttttttctttacttttctttactttcggccacttcaaccaggtaaactccaatacagataaaaatgattgcaaatgtctgcgtccagctaaaacggtcttgtccgagagcaagggaagcaatggtcgccacaatcagaatcagataaccgtagatagcgacgaccgttgtcttcagatatttcaaaccgacaggcagcagcatataactgatagtggtcgggaaaatcaatacgaacatcagaataaggaaaggcgtccaatggaacggcatggagaataccggggcatcaaatcctgtaataaacgtgactataatggcagacacggcagcaccggaaaaggtatatcgcaacatcgttatcgctccaatggccgtgaggatgcgctgactaagaatcagatagacagcatacaccacagaacttagaagacaaagcatattccccgtaaaagcatcagaggccaaatcatcgctttgctgggttaggatgcaaaccaacgctcctatcagaccgatagaaattcctattatttttttagcgcccgccttctccttataaaagaatatcatgataagaaaaacccaaataggctggagactggtaaatatggaactggagacaggagttgttttactcaatccggccagatagagaaacataaagccgtaaagtcccaaagcccccaacagaaagaggagccatttatctctggttgacgatttctccggaggcataaaccacccgatcacccaaaaagcagctgctgcaaatgtgcaacggagcgtggctcctgtcaatggactcatccacaaaggcagaagatactttaaggcattcatatttaaaccgctaaatactttcgagacagccatgctaagattggcttccagtttcttattcttcattttctattttaattggtcgttaaacaaaaaggtattacggcgccgatatgcccagaaaagagtaacaatagttatcagaagattaaagataaaaggaaactcctgtgattgggtatggaatatccactggaaaaaatcgacaataaagggataaagcaagatagccagataattcatcatcatcacaaacgccaaagccaatgtggtcttttgcggcagtgcggtctgggtggtcttatcataaagcataggttgaataatgccatatcccaaaccaaccaggatacatccgggaataatcagccattcgatcggagctatccagattaacaacaatcccaatgccatagacaggaggctgtatgcttttgtacgtcctttcagcagggctacaatcttgtccaggcaaaaacccggagcggtgatggccagaaagaaaagcgaaatcatcaatccggaattgccactggaaaagtgatgcttttccattaagaaaggtagattgaagatcaccactaccacgatatatgttatcacgccatagaagagcatcaactctatcagatgtttgatgtgaataccgtacttgctgcctcctatatctatggaagtagattgttcggaggattcgttgtcttttgtagtatctgcagaagaagaaggtgtaaaagcgacttctcccgtccggtcttcttttaaatgtcctaccagcagaatggaaatcaatgggaggagatagaccaggaaaggcagatgccagctgacttctgcaagatagcccgttacggcagttgctatcactaatgtgaaattagtaatagcggagcttaatccgaactgtttcacccgataggttcctacaaagtatctggaaaccaacccggtagataaagggataatcagaccggaaccgataccgagcaaagcacttaccacaattaattgccacattcgattggaaatcagatacaaaataccgctcgcggcaaaaagccagagtccgacctttaatacacggacataatcgactttctctgtcagtttaccacccagcaatataaaaggaataatgagcagtgatggcagcgaagtcaacatctgtatgtccagatccgtagcttttggaaatatcttcgtaagatcacccaatataggtgaaacagccagtcccggcaatgaagtcaatgccgaaatagaccagatggcaattaaagtaataagaggaattgttccccgtcccgtctgtatcttcataatgcttattcgttaaaagtttaggtttgaagaaaacaatagttgctttataaagttcaaatatgcaccgaaatgagccaaatgaacatttattgaaacgcagattaacgcagattttcgcagattattagaaggctgcgccatgtttgagaacttttttattctttacgaaaatctgcgttaatctgcgtttcaatacttatttgctaaaatatcaattgattcataaccgtgtgggaatgaactaatcttagttcttctaaaatttaattggtaatatgcgatgatttaatattcatcatacataaatttattcgtctgacagttgttgaactttcgtctggcagttgtttctttttcgtctgacagttgtcagacgaaagaataacagctgtcagacgaataaaattatgtatcattagccataaacccattaggcatcaaaaataaatctgcacaagctcgaaattagttcaaaactagtacgatcataagcttttccgctaaatcacaaaagctccgcttcaataagggcgtcctcctccttaataaacgccaaataatgtaaaaccgggaaactttcaaacctatctgctgttgttgtgggaaattcgacggggaaaatccccatcgccctaaacctttaaaaaaacaaattagtatggaagatttaaatttcagaaaaggtgatgcaaaaaccgatgtatttggttcagacagaatgttacaaccctctccggtagagaaaatacctgatggacctactactcctgaagtcgcctatcaaatggtgaaagatgaaacatttgctcaaactcagccccgtttgaatctggctactttcgttaccacttatatggacgaatatgcaaccaagctgatgaatgaggccatcaacatcaactacattgatgaaacagaatatccgcgtatcgctgtgatgaacggtaaatgtatcaacatcgttgccaacttgtggaactctcctgaaaaagatacctggaaaacaggtgctttggctatcggttcttcagaagcatgtatgttgggtggtgtagctgcctggttgcgttggcgtaagaaaagacaagcacagggcaaaccatttgataaaccaaactttgttatttctacaggtttccaggttgtttgggaaaagtttgcacagttgtggcagattgaaatgcgtgaagtgcctttgacgcttgaaaaaaccactcttgaccccgaagaagctttgaaaatgtgtgatgaaaacaccatctgtatcgtaccgattcaaggtgttacatggactggactgaatgatgatgtcgaagcattggataaagctctggatgcttacaatgccaagaccggttatgacattcctatccacgtagatgccgccagtggtggtttcatccttccgttcctgtatccggaaaagaaatgggacttccgtttgaaatgggtactttctatcagcgtatccggccacaagtttggtttggtatatccgggactcggatgggtttgttggaaaggcaaagaatatctgcccgaagaaatgtcattcagcgtcaactatctgggcgccaacattacacaggtaggtttgaacttctctcgtccggccgcacaaattctgggacaatattatcaattcatccgcttaggattccagggttacaaagaagtgcagtacaactccctgcaaattgccaaatatatccatagtgaaatagccaagatggttccgttcgttaactactcagaagatgttgtgaacccgctattcatctggtatctgaaaccggaatatgcaaagagcgccaaatggactttgtatgatttgcaagacaaactatctcaacatggttggatggttcctgcttatacattgccttctaaactggaagattatgtagtgatgcgtgtcgttgttcgtcagggattcagccgtgacatggcagatatgcttctgggcgacatcaacaatgccatcgccgaactggaaaaactggaatatccaactcctacccgtatggctcaagaaaagaatcttccggtagaagccaagatgttcaaccacggtggtcgtcgtaaaaccgtaaaaaaataaaatgatctatggataaaaaagtaacactcgctcaattgaaagaagtggtacaggaggcatacgatcaggtaaaggccaataccggcggcaagaatgccgactatattccttatctggcaaatgtcaacaaggatctctttggaatcagtgtctgcctgctcaacgggcagaccatccatgtgggagatactgactatcgcttcggtatagaatccgtatccaaagtacatacggctatcctggcactgcgtcaatacggtgctaaagagattctggacaagattggagccgacgcaacaggcttgcccttcaattcaatcatcgctatcttgttggagaacgatcatccgtctaccccactggtaaatgccggagccatctccgcctgtagtatggtacaacctatcggtgactctgccaagaaatgggatgccatcgtaggaaatgtgacagacctatgcggcagtgccccgcaactgattgatgaattgtacaagtcggaatcggacaccaacttcaacaaccgttctatcgcatggctactgaagaattacaaccggatttatgatgacccggatctgtcattagacctttacacccgccagtgttcattgggagttactgcattgcagctttccatcgcagccggtacaatcgccaacggtggtgtgaaccctgtgactaaaaaagaagtttttgatgccgtcctggctcctaaaatcactgccatgattgccgccgtaggtttctacgaacataccggcgactggatgtacacttccggtattcctgctaaaacaggtgtaggtggcggtgtgatgggcgtactgcccggacagttcggtattgccgcatttgctcctcccttggatggttcgggcaactccgtgaaagcgcagttagctattcaatacatcatgaacaagctggaattgaatgtatttagcaacaaccatatcaccgttgttgactaaaattctctcaatctcttttataagaaaggtaaaggttactatctattgatagtaacctttttctattccccttaccctcttgatttcccgccaatgtttcaatacaaacggcatcatttttcaaatgctacaaattgaacttacccctgaacaactctagttattaaaatgagatagctgttattaacccggataaggtaaagtttgattcattcaataacggttataacagcgtcgtgtcttgtctcttctcaacaaagatagaaagtaatacctcttttccaccccttttccttcgccgcttataaagaaaagtaattatagtattaagaaaagtaattcatctttggttttcaacactttaccgtcatcatcacttcatctgttttttcatcttatcccagagtgtgtcaaaacgcagattaacgcaaattaccgcagattattccaattatattgatatattaatcaacgacttataaaattatttctgcgataatttgcgttaatctgcgttttattattcattatgacacacctcctttctgtacggctgctttttctgccaattcttttttctcggaagcctttttctctagttcctcctcttcgtaatattgttttctacgtttgttagattgctgaatcagatttgtgatataaactgtaaagatagggaacatcatcatacccagggcagccaacaaaacggaaagtacacgtccggtcaccgtctgcgctatgatattcgaaccgacggtagtgacatccataaaagcccaccacaaagcatctccataaccattcaccaagggattcacccgatgctcaagcacaaaaaatgccagactggaaaaatagaccgttgccaacaacatcgtcagataagagacaaacaaactcgaagcacgattgtaggtcaaccagccgaccacaatggcaagcgcatatcctcctctcaataaaggtatgaaacggagaagataggtgatctcatccgaaaatgtccacccataataggcgataatattctgataaggaattgccaccaataaaaagataaaatgcgtccgcaaataacgtcccttatgttttgccagaaagaactccaatacaaaatcaaaaagaaaccaaagacagatacatagctgtactttcatatacgaagactgtgtatagaaaggaattcccttaaaagtatctaccgagatactaatcaccaggaatagggacattactaatataataatgtgaagaataccatagattccctttttcccggaaataaaatctgaaagcgctgatttcataactacttagtttataataaaatgattcatttataatttagattgcttaaaaacaattggagaaagcgattgtttcggaagaagtaaatccggggttacaatctcccatttcggggatgttaattaacgaactttgaaagagattgcggaaacatctcacgcaaaatgttgttataacactgactttaaaatatttttcacttaaaaccttaacttatggcgaatattaaaaatgcagtgaagctgggtgtgtttaccctggctatcatgaatgttacggcagtagtatccttgcgtggactaccagccgaggccgtatatggaatgagttcggccttctattatctttttgcagctattgtctttctaatccctacatcgctcgttgcagcagagttggcggcgatgtttcaggataagcagggtggtgtgttccggtgggtaggcgaagcctacggcaaaaaactgggattcctcgccatttgggtacaatggatcgaaagtacgatctggtatccgacagtgttaacgtttggtgccgtatctatcgctttcatcggaatgaatgacgtacatgacatgtcactggcaaacaataagtattatacgctcgtcgtagtgcttatcatctactggctggctactttcatttccctgaaaggtatgagctgggtaggtaaggttgctaaaatcggtggtatggtcggtacaattatcccggctgccctgttgattatcttgggaatcatttatctggcaagcggcggacattccaatatggatttcaacagcagcttcttccccgactttaccaactttgataatgttgttcttgctgccagtatcttcttgttttatgccggtatggaaatgggtggtatccacgtaaaagacgtagagaacccttccaaaaactatccgaaagccgtattcatcggtgcacttatcacagtgttgatcttcgttttgggtacttttgcattaggtgtgattatccctgcaaaagatatcaacctgactcaaagtctactcgtcggcttcgacaactatttcagatatattcatgcttcctggttgtcaccaatcattgctgtcgctcttgcatttggtgtactggcaggtgtattaacatgggttgccggtccgtcaaaaggtatatttgccgtaggtaaagcggggtatatgcctccgttcttccagaaaacaaacaaactgggtgtacagaagaatatcctgttcgtacaaggtatcgctgtaactgtattaagtctgttgttcgtcgttatgccgtccgtacagagcttctatcagattctgtcacagctgacagttattctttatctgattatgtacttgttgatgttctccggagctatcgcattgcgttataagatgaagaaactcaaccgtccgttccgtatcggtaagtcaggtaacggtttgatgtggtttgttggcggtcttggtttctgcggatcattgcttgcctttatcctcagcttcatcccgcccagccagatctctacaggtagcaacactgtttggttctccgtactgattatcggtgccattatcgttgttattgctccgtttattatctatgcttccaagaaaccgtcttgggtagatccaaactccaatttcgaaccgttccactgggaagttcaggctcaacctaccactgtcaatgtcagtgcaagtaacgctaatgctgcccgtcctaccgcaacttctgcacatacaggaggagcaaccggggcaagtacagctaagcctggtgcaaccgtttctaatgcagcagctcctgatgcggcatcctctggtgccaccgcttccggtgctactccaccaagcagcagttctgctacatccggcggaaattctacttccggcaaagcatctccgggaaccggagacaaagataaggatgcacctaagtcgtaaagactaagtgttcatcctgttcacaaaaagtaagaggctattcaaacagctttgaacttataaaattaccctcactacagtgaagtgctcccctttagtcggttataaaacctttgggatgcacttcacggttgtagtgagggtaatttattttagagatttttgcaggccctcttatttagaagtatgccaatcatcatttaatagatacaatacctagcgattggagattactttattgcctgtgactttattagttccggttttatcacccgtggcaacacaaagctgaaagtagatccccggttaatttccgaatcaagttcaagatttccacccagattttggatgatcgtttgcgaaagagtcagtccaagtcctgtcccctgcatttcacgatcaagttttatgaaacgtgagaatatttttttctgttcctctttcggtatgccaatgcctgtatcggacacaacaaagcaaacctcttccgttcctttcaggctgcaacccaaacgaatttcacccgattcggtgaatttcattgcattatgtaacaggttagacaatacctgaatgatacgttcccgttccgaatacatcattataggttgtatgtgtgcctcacaaaccaattccaccgacgagttattcaatttcgtcttaaaaattccctccaactctcttagcaaatcattggcatcaaactccgtataaacaaaatctactgttcccgattctatttgagaaagatcgaaaatatcattcaccaggcgcaacaagcgttcattattctctgcaataacatcagcatacatttttcgttcctcttcactggaagccgataccatcaaaccggaaaatccgacaattgcatttagcggtgtacgtacctcgtgactcatattagcaataaaggcagatttcaatttatcagcagaaatggaatgttctctttcaatagacagcagcctttgcacatttttcagctccgtcacatcataaacagtcaacaccatataatcttcaccatgaatattcaaataagtacccgataccgatacatcgcaaagggtcaccttcgtttcatcctcacttaatagcttcatggaagcttccagatttttaaaacttgctttcttgtaaaaagcttttccgatagacgcacggatacaacatagtttgcattgttcatgctgaccacattcaccggctgcaatcgcatttctacaatgcagcaaatccccgactcttttggtaactccacctacctgaatcggaagacggtttaaagaataataattggtgtcacaaaccacaaaatccttgtcaatcaataagaagtaagcattgatgttctgcaaaaccagagccaactttttaagttcattctctttgttttccttcgaatgcacctctttctggagtgactggcactttgcccacatatagatgaaggcagctaacaaaactattataacaataatcgccagtgatgacatagtaatagagtgtttatattgttttgatcgtttcagtgcgtaaatttataaaatatgtcgcataaatagctgtttatctacatatttattctaacaaaaatgcatttatatttccacgagtcagaaattggtaaaaatttccctttaagttattgcggtattaaaaaatatacttatctttgcacccgcaaacgagaaaggtgccatagctcagttggtagagcaaaggactgaaaatccttgtgtccccggttcgattcctggtggcaccacttcttaagcaatcggaatgtagcgcagttggtagcgcactacgttcgggacgtaggggtcgggcgttcgagtcgcctcattccgacaaaataaagggtagctttctggagtacagtaagttgccctttatttctattcagtcacttgaacaaattcaggacggatatgtaataaaacacaacctattatatcatgaaaaacaggatttatctctttacagtagcagtagcttcttttatgtgcatcagctgcacaaaaactcaaactaccctttccgagaatgaaaagacagtcaatcctcccatcatgggatggagttcatggaatgcatttcgcgtagacatcagcgaagacatcatcaagcatcaagccgacctgatggtgaaaaaaggtctgaaagatgccggatatcattatgtcaatgttgatgacggctatttcggaaagcgcgatgacaacggaattatgcatacccacgaacaacgtttcccgaatgggatgaaaccaattgcggattacgttcacggcctgagaatgaaagccggtctctataccgatgcgggcaacagtacatgtggctccatgtgggacaatgatgcagcaggcgtaggagctggtatctatggacacgaaccgcaagacgcccaattatactttggcgactggggtttcgactttatcaaaattgattactgcggaggagatgcgctgggacttaatgaaaaggagcgctacacttccatccggaacagtatagacaaagtaaacaaagatgtttccatcaatatttgccgatgggccttcccgggcacttgggctaaagatgcagcaacttcctggcgtatcagtggagatattaatgcacattggggatcattaagatatgtagtcggaaagaatctctacctgtcggcttatgccggaaacggacattataatgacatggatatgatggtcatcggattccgcaacgacagtaaagtaggtggacaaggtcttaccccgacagaagaagaagctcatttcggtttgtggtgtatcatgagctctcctttgcttatcggatgcaatctggaaaacatgccggattcttcgctcgaactgctgacaaataaagaactgatctccctcaaccaagatccgctgggcttacaggcttatgtagctcaacatgaaaatgaaggttatgtactcgtaaaagatattgaacagaaacgtgggaatgtacgtgcagtagctctttacaatccttccgataccatctgtagtttttccgtgccgttctcttcactggaatttggaggaaacgtaaaagtacgtgatctggtaaaacatagcgatttaggaaacttctccggtaccttcgaacaaacgcttcctgcacacagtgccatgttcctccgcatagaaggcgaaacacgtctggaaccgaccctctacgaagcggaatgggcttacctacctcttttcaatgaccttggcaaaaatcctaaaggtattatttatgcccatgataaggaagcctccggcaaaatgaaagtaggtttccttggcggacaacctgaaaactatgccgaatggcgggaagtatatagcgaaaatggcggacgctatgatatgaccatccattatttatatggcaaaggacgacaaatagaactggacgtaaacggtatcattaccaaaatcgactctttgggaaaggataacggtcataaccaaatcacagttcccgttgaattaaaagccggatacaacactattcgcatgggtaatagttataactgggcaccggacatcgactgcttcactctgacaaaagcattgtaatttgccgatataaccctccatattaaaaggagcaaacggaataaagatgccccctaaaagtttttcacctcacttttaggaggcactttaaaagccattattgctcctttttagtttagattctgtctagtaaaatcgtgcaatatttcatatctttatacctatttcgctttattccggtgttatcgtaattgccgctttctctcttacatttacctgcaaacgtgcatctcctgtcagaggtgtccaaaccacccgcttgcattctcctttttgcagattattagaatgacggtcactgccacttaaatattccgttcctacttccgtattctcaaatgtccatttccacacaccgtccaaattcaaatagaaattttcaattatactatttcttgcacgaaactccagtctattcccttgaatatcaagcgaatgaatttggcaagaatcgagtagtatgttatagcgaccacggacaaataatgaatccgtatcaatccccttcaaattcagtttcaaaccgtctgtatcggtaattataccagccagcgagtccacagctaatttcacgtcaaaacctgtcgaataaataaagcctctgttatggtacttatcagaaatattctttgagctaaagtctagcttcatgaacaaagtatcattcttttgtataacattcaagtatttccccttaggatacgaaatttgttccttccctaccgaagtaaaaatggattctattttcatttctccatttacaaacacatgtctctcttctggcactccgtcctgactgacaaacacctttacaacatgtacaccattcaaatccattgtcacttgttcatcgcctccaaaatttacatcttcccgatacggcttccccgacatagatatgaaaataattgttgctacaattaccatcaatcccgaaacgaggaggcctataaatatataagtagtacgtttcataatattcgtctttattctatttttgcttttttataaactcatgatacattgtctctatctcttttatcggtatatcaagcgtatacaactgacgaaagaaatagtcaagttcttcctttagaaaggtatccttacggagagaatgaatcagttctttcgctcccaaagctacaaaatacccaatgccacgtttattataaataatattctgcacctgaagataatcaaaggaacgcatcaccgtattagcattcacctccacaatagcagcatactctctgacagaagggattcgctcctcttccggatattgtcccagcaatatctcatcacagattctatctgcaatctgtaaataaatagctttactttctttaaaattcataggttaaggtattacattcgattaataatttcagactccttaaaacggaaataggccagtgtccaattcagcaacgtaaaaagaatgccggcaacaattatgatccatagaacagtatcttttgactcgaaaatacctcccgaataatatcggccgttttccaacagcattttgcttaccaaagcaccgaccaagaaatatattataccaataatggttcccgccgcaaatgttttcaggaaagagttctttggccaaatagagctacccagtacaaataaagattgaacaaaaaaatagcctgacatcagtgctccaaattccaacccgctgttgcacaaagtataatatttctcatctccaaacacatgcgacaaagcaacaggggcaatgaagtctttttccggataggccaaagaatagataatcaaccgtgtatagtccgccaacttataagaaatcaggaaaacaaccagatacaccactgtgaacacaaaccatcgggagaagaatttctcgaaaggagttgccggaaccatcagcatggaagtgcggctcgttttcgttttcatcctttccattgtaaacgaagcactcaaacagccgaagccccataatccccatataaaaacaaccaaaagaaatacccacgccggatcttcggcatagacatgattggaagtacctctatactcaaaatatccattccaaaccattaccactgccatcactccatacatcaacaccatacgaagcacattcgatttccaattctccaccatctccttacggcaaagattcataaaacgaggcaaactgaaaaaagtatcttttatcatcgtcttttatttttgagtgtgaaacaatcgggctatctcttcaggagtagccagtgtagcattaaaaagaagttccaggtttagttccgactcgtcctgcttttcattaggaaggatcaggtagttaccctgaatagtaggaattgcaaaaagcgcacttttggccaattcccgatcatcactctccacaaagaaaagtttgtcgcaaatattacttgtcgattcatcgagcaacacacgactgtcatccataatcaacacatgatcgagcactttgtcgatgtcacgaacctgatgcgtggaaatcacaatcgtcttatcatccgacatacccgatgctataaacttacggaactgacttttgccgggaatgtccagtccgttagtcggctcgtccatcaacaaaagagaagtgtttgtagcaagcgcaaagctcataaatactttctttttctgtcccatagaaagtgatccaagatcaatatctatatccatctcaaaataatggagatatttaatcatctcttccttgctgaaacggggataaaaaggaccgttcaactccacatagctgaccagagagactgaaggcaattcaaactcttcgggaactaaaaacatatcctgtaaagtaaccggtaacctacggcgcacatctgtatcatgaaacatcactttaccgttttcaggagtcaataacccggacatcagatagagaagagtagattttcccgcaccattctttcccaacagtccatataccctgccggattcaaacgaaagcgaaaaatcacgtagtaccgcacgcttcgatttacgataagtaaatgaaagattttctactgtaatcatagtatctttgtttaatgaataatgatcttttagtgtattagtgtaatagtacaccacaaatgtagacaatcttttgaatattccaatagaaaaggagaaaaaagtgcaaaaaaaggaggagctaagatcactctccactcctcctgtcacgacaaacaactaaaattattcactatttgatgccgtccaatgcccttttagcagtagcattagcggggtctatagccagaattttactccagtattctatggatttatctttgttagcctttgcttcggctttcaatgccggattttcgatagctaacaaatagtaatatccaagataactgtagcattcaaccaaagctgaattgtaatgaggatcgtttttgctttccaataaagcggccacttcctcatagaaaggtttcgcaagtccttgagttgtttcagggtcaagtgcagaattggcacgtgctctccagaagttacccaaatagctgtccggcgctgcttccgcaattgcatggaaagtagaatcggcggacattaacgcctgcttacgttcttcaacagtgattgctaatgaatcaggttgcgtaccagcaccgtaataaagtctaccaaactggaactgtaagtccggagtctgtttttccttatcaagagatgcataatatttctggtaagcactgattgcttttttataatcgttcttctgttcgtaagcagaagagatatttttaaataaatccgtcttcgtcggatccatctttaccgctttctcatattgtactactgcatcatcatattttttcagactctccaacagatgtccataatacatataatccaaatacgaataatcggctttatcacattccttgaagaagacatcggcagccttcaacgcttcatcaaaacgtttcaggtcagtataattatacattgccaaacgattgaacgcagcatgacgggcattcttttgcaatcccatattagctacttcgagtgatttatcaaaatcatggttcaaaaataaagcaaaagcatacttcaccaaatcttcttccgtagcagtaggtcccattgcaaaattcgcataagcttctactgccttattaaaatcattttttaaatagtaaatttcggctaattttttatctacagctgtgttggacggttccaagtccttcaattggttcagcttctcaatggcaagacttgcattggctgatttataaatatctgcatatttcagataagcttccgtacatttcggatcgaaataaattgcctcctcatacttttgagaagcaagacccgcatttttctgttttacggcaatatttccttccaatacagaagcaagagccgatttgccattcgcttttctggcaagagctgcatactcctgcgcttcgggaatcttgtcagcattcagatatgcgtctccaatagccaccaacaattccacatttttcttattttttcctttaatcagatgttcagcttcttcagcagcctgtgccggattcgtctgaatagtttctttcaatttcgcaaccccagcctgccattcggcgtcagatgattgcgcatagagcgaccctactgctataaacgctccagctaaaaacatttgtactcttttcattatagtctctaattttagttattattcgtctttcacgtggacaatacgcaccggctgagtagccggaacaagtccggattttaatataatcctctgccctttatcggatgtcataaaagaagcaaatccccaaggcagcccactgcgaggatcattcagcaatgcataaatagatcgtgccaacggatagttaccatagaacaggtaagcctgataaggtttataactgttagcaggagttgccacatcctctgcactcactgacatcactctgatctcttcgcgaaaagaaagattggttgtatcactgcggttccccaaccagtttactccaacaactcccatagcgtcgggattattcgctacataatctatcacctgctggttggttttcaaggcactgacgttaccttcagccaactcttttccaccacagattgagtccattgcaaaacgtacggtactggagttcttattatcgaacaccacctgaatccctttcaaacgggaattcggattaacctctttccagtttttcacctcaccggtaaggatgcggcggaaatcacgtacactcaacaaagaatccggattagcacgattcacaatcaatgccagaccgtccgtagccaattttatctcgcgaggaaaaaacttacggctgtggaatgaattcatttcttccttagtcagtgtccgggttgcaatagccaaccggacactgtctttcagaagtaaatttatcgcttccacttcagttgtgtagcgagggacaatcccggccaaagggtacaggctctcaaacacctctatctcttcttgtatgataggttcgaaactctcatccgctgcgatagataccacaccggaagaataagtatccgtcggtccttttgattttgagttacaagcactcaagaccaccaacgctacgagtcctatcagcctaaattgtctcttcatcatcttttattgtaatctaaacattaccggaacggtgaacttcacacgtaccgcttttccattctgcttaccagggagccatttcggcatgctttttaccacacgaacagcttccttatccagataagggtctacaccacgagccacatgtacgtcagaaatagaaccatcacgttcaacaacgaactgtatgataacgcgaccttgtgttccattctcctgtgcaatagtcggatatttgatattcttacccaggtaagccatcaattcagtctgtccaccagggaaagtcggcatttgttctaccatatcgaaaaccttttccggttccggtgcagcctgtgttaccacctgcttaaggtctgcgatatctttaccattagcctcgtcattaccttttacgtcggcaatagagatggatactttggtagcattcaaatcttcctggctcttgatttcattgtcttcatgcacttcttcatctttcttgatgacaggagctgtaaacttgatagaactcttcaatgcagggggaggaggtgcaaccggttctacgcgtttcatctcttcctgtttgatttcaggttcttccaattttgacagagtagttacttctgtcatcacttctttctgctccggagttgccaacttaagcagtgtagggatactaaatccaaccgctgctatgaccactacaatcaacatagcgacattatgtcgttttgttgaattggcacgcattctatatgcgccgtatgcttggtttttgccttcaaaaatcagttgacaccattccgaagaagctaaatctaattttgccattttacttttcttttttaggtgttacatcaattatcggccaagttttgtgacaattcacctttcgcatcataattcttaatcaagaattcatcagcttcagcaatatctgttatcacatatttaccaatattacatatctgcatttcgtccagcgcgtcaatcagattcatataagaagcatcatcggtagctttgataatcacggtcggtgtatcctttccgctctttatctcagaaacctgcttcttaaattcgtcatccgtgatcttaagatcaagtttttgctgcttcaattctcttactttattgacagcaacagcattcttctgaagaagtacggcacgcagtccatctgcaccgtagctagtttctttcaacgaggtataatccttatagttaggttctccctcgtaataatagagtttgttatcagctcccagcaataatgtgattgcttgtgaagccttcaccatactcttttggttttcagttatatctttgtcattactcggcatgcttatctccatcgtctgaggtttgctcagtgtggtacaaagcataaagaaagtaatcagcaacatgttcatgtccaccatcggtgtaaagtccacccggacagtcattttcttttgcttgctctttcctctttttccgccgctctcttgtacttcagcactcattgtatttcctcctttttaattttcagattctgccttgagagaagtaatcagattgtaccgattttcccgcaaatcctgaagtgagttcataacgttctttatcactgagtatggagttgtagcgtctgccttgatagcaatacgtagatcagcgttagcggcacgtgcattacgtacccacgatttaaactgattgtcaacactatcgcatggaataccttcattctttaagatcttatcccgttgatcttccgggagatcaagatatttctgcatacttctgataggtactccaaaagtagaagacaagataaatctcttctcctgttccggagtaaacttaatgccatactcttcacccatgctctccaatacagcctgcatatcctgctgcttgtcgaggctcataaatatttttccttccggatcaaccagaatctggagtacattcgtctccggaatcttgatttccgatacggaagccggagtggtaacttgtactggttctttcttcacaaatgttgaagtcaacataaagaaagtcagaagcaatacagtaacgtcactcatagctgtcatatctatgaacgtacttttctttttaatttgcgctctacccatgattaataatagattttataagggttcgcagaattagtgagtagcagcaaaagtttgcacgatagagaatccgacttcgtcgagtccgtaagtcaatttatcgattttgttagtgtaatagttgtaagaaataacagccaatgcaccagtcaagataccgaaagcagtattaatcaaagcttcagagataccttgtgacaaagccatagagtcagcaccaccaccagcagacaaagcagcaaatgaacggatcataccgattacagtaccaagcaatcccatcaatgtacccaaagtagtgatagtagcgatgatcggaagattttgttgcatcataggcatttccaaagcagtagcttcttcaagttctttctggatagccaacagcttctgttctttaggaagagctgtgttcttttccatttcttcatacttacgcaaagtagaagttactacgttagcaacagaaccacgttgtttgtcacagatttcctgtgctttcttcatgtcacctgcagctaaagcgtctttgatgttagctacaaacttagacaatgaacctttaccgaaagcagaacgaagagcaaaataacgctcgatgctcaaagcaagtacggttaacaacaatgtctggataataggtacgatgataccacctttgtaaatagtacccaacatgttcaacgggtgattgttagggtcattgttcataaagttggacgggttacctaataagaattgaaagatacatacagctattactaaacagcagatgattacgataccggcattctttatacctacaacttgagtttttttagtagtttccataataagtttttttgttaagaaattaattttagttatttaggaagtaaatttttcaattagacacactgcgctacagaccctgcaacttttaataggtaaagtcacacggtttcatacagagtacgaaaaaaaacgaataaaaatggagaaaagactaaataaggatgcgtcttaaagcgaacacgtagtagtcgctacacgtaatggagtaatgtggatccttatcggaataaaatgatttactttgatccaatactaaagagttttctcttaacacgagaaacttttgcataacgtctttcaaggagtcattgatttcaatgattctccgcagacgataattattagagtttgattctgttacgagtttaagtcctaattctacgtcagaaacagacaaagaacggacgctatcatagctaacagactgcccatccacagaagagcgttgattgctgtcagaagataattctgataattgacaaggtgagtcactaaaaatacaagtagagaaattcatagcatttccgcttacgctaaaagatagcatcagcagaagaaaagctaatatgaatttcggggaaagtttcattgtatttttagttgtttaatcaattacaatagattcggccacaaatgtagcaattaattgtatatgtttatcgtcgttcacatcatttaaacatttaagtttaactcttttataaaaacaagctacaatatgttttgttcgatgagtttgcgacttaatatgttaaaaaaacatttcctctgaatatccagagttttaagaaattaaaaatcccctccaatatttctactgaaggggacttttcttaaaaacggcggctacctactctcccactgttacgcagtaccatcggcgtgacgaggcttaacttctctgttcggaatgggaagaggtggaaccctcgtgctataaccacctgaagaaggttatgacatgatgaaaagtaaaatttcagtgtctagcaagctaaacgtatatacccaaccggtacatgtccgaaagaaagtgaacgggcaattagtaatgctcggctttgatgttaccacctttacacctgcatcctatcaacgtcatcgtctttgacgaccctaagaaatctaatcttgtggctggcttcgtacttagatgctttcagcacttatccaatcccgacttagatacccagcgatgcacctggcggcacaactggtaaaccagcggtcagtccaacacggtcctctcgtactagtgtcagagccacgcaaatttcatacgcccacgatagatagagaccgaactgtctcacgacgttctgaacccagctcgcgtgccactttaatgggcgaacagcccaacccttgggaccttctccagccccaggatgtgacgagccgacatcgaggtgccaaacccctccgtcgatatgagctcttgggagggatcagcctgttatccccggagtaccttttatcctttgagcgatgtcccttccatgcggaaacaccggatcactatgctctagtttcctacctgatcgacttgtctgtctcccagtcaagcgcccttatgccattacactctacggacggttaccaatcgtcctgagggcacctttagaagcctccgttacacttttggaggcgaccaccccagtcaaactacccaccaaacagtgtcctcgcatctacgagttagaactcaaataatcaaagggccgtatttcaacagcgactccacaaatactggcgtacctgattcaaagtctccggcctatcctacacatcaattacccaaattcaatgttaagctatagtaaaggttcacggggtcttttcgtcccatcgcgggtaatcggcatcttcaccgatactacaatttcactgagctcacggttgagacagtgtccagatcattacaccattcgtgcaggtcggaacttacccgacaaggaatttcgctaccttaggaccgttatagttacggccgccgtttactggggcttcaattcaatgcttctcttgcgatgacatctcctcttaaccttccagcaccgggcaggtgtcaggctgtatacgtaatctttcaatttggcacagccctgtgtttttgttaaacagttgcctggacctattctctgcgcccaactctcgttgggaccctttatcccgaagttacagggtcaatttgcctagttccttaaccgtgaatcactcaagcgccttagtatattcaacccgactacgtgtgtccgtttgcggtacgggtaccttaaagattaagtttagcggattttcttgggagtatgcttacacgcactattaccttattccgaagaatttggtatactatcaggttcgactcttatcccggatttgcctgggataatcaacatctacacccttcaacggactattccgtcagtccgcggcgctgtcactcctccgtctccacgtcactccttaaggtagtacaggaatattaacctgttctgccatcggcctcaccgttcggctgagccttaggacccgactaaccctgatccgattagcgttgatcaggaaaccttagtctttcggcgagggggtttctcaccccctttatcgttacttatacctacatttgcttttccacacgctccagcaaagctcacgcttcaccttcgacgcagagtggaatgctcccctaccgatccttacggatcccatagcttcggtaaattgcttaatgcccgattattatccacgccaaactcctcgactagtgagctgttacgcactctttaaatgaatggctgcttccaagccaacatcctagctgtcttagcaatctgacttcgttagttcaacttagcaattatttcgggaccttagctgatggtccggattcttctcctttaggacatggaccttagcacccatgccctcactcctgggatcgaactactgcgcattcggagtttatcaagacttgataggcggtgaagccctcgcatcttatcagtcgctctacctcacagtagtaattcccaaggctgcacctaaatgcatttcggggagtacgagctatctccaagtttgattagcctttcacccccaccctcagttcatccggaagcttttcaacgcttatcggttcggtcctccagttagtgttacctaaccttcaacctgaccaagggtagatcacttggtttcgcgtctactccttccgactaatcgccctgttaagactcgctttcgcttcggctgcggatctcaagatccttaaccttgccggaaaaagtaactcgtaggttcattatgcaaaaggcacgccgtcactgctgaagcagctccgaccgcttgtaggcgcacggtttcagggactatttcactcttctattcgaagtgcttttcacctttccttcacagtactggttcgctatcggtctctcgggagtatttagccttaccggatggtcccggcagattcacgcaagattcctcgtgtcccgcgctactcaggataccactacgcttcatttagcttcgaataccggactatcaccgtctatggtcccattttccaaagggttcttctcactaaatttcttgcgacatcgtggtcctacaaccccaatattgccgtaacaacattggtttgggctaatccccgttcgctcgccactactaggggaatcattattattttcttttcctacaggtactaagatgtttcagttccctgcgttagcctcttgctatgcaagatgtcattccttcagaatgacgggttgtcccattcggaaatcttcggatcaaaggttatttgcacctgcccgaagcttatcgcagcttatcacgtccttcatcgcctccgagagccaaggcatccgccatgcgcccttgcttactttctttcaaacgttttattctcgtactggtattggtagtggaattgcttccttctatcaatattgcgtactcgaacacgtacggtttgatatatacttttagctcttactaaaattttactttttgtacatcatgtcaaagatcgtttctctttttcagagatcgtggagaataacggattcgaaccgttgaccctctgcgtgcaaggcagatgctctagccagctgagctaatcccccaagaggttattcaagaattttgttttttagcttttagctttccctgttcctcattcttgagcttggtagtcccaggcagagttgaactgccgacctctacattatcagtgtagcgctctaaccaactgagctataggactagttcaaccttgtctacctttcgtctagactcggcttcttttttctcttgtttatctctatctatacttctatagatggttgatctatatattataaataaacaagtaccagtagtacaaaaaacagaacctttaaagtcttttagtggctgccacgttttgtgacagttacggcatcgctccagaaaggaggtgttccagccgcaccttccggtacggctaccttgttacgacttagccccaattaccagttttaccctaggacgctccttgcggttacgtacttcaggtacccccggctttcatggcttgacgggcggtgtgtacaaggcccgggaacgtattcaccgcgccatggctgatgcgcgattactagcgaatccagcttcacgaagtcgggttgcagacttcgatccgaactgagagaggtttttgggattagcatcctgtcaccaggtagccgccttctgtaccccccattgtaacacgtgtgtagccccggacgtaagggccgtgctgatttgacgtcatccccaccttcctcacatcttacgacggcagtctctctagagtcctcagcatgacctgttagtaactaaagataagggttgcgctcgttatggcacttaagccgacacctcacggcacgagctgacgacaaccatgcagcaccttcacaacagccttacggctatactgtttccaatatattctgttgcaatttaagcccgggtaaggttcctcgcgtatcatcgaattaaaccacatgttcctccgcttgtgcgggcccccgtcaattcctttgagtttcaccgttgccggcgtactccccaggtggaatacttaatgctttcgcttggccgcttactgtatatcgcaaacagcgagtattcatcgtttactgtgtggactaccagggtatctaatcctgtttgatacccacactttcgagcatcagtgtcagtgacagtctagtgagctgccttcgcaatcggagttcttcgtgatatctaagcatttcaccgctacaccacgaattccgcccacctctactgtactcaagactgccagtttcaactgcaattttacggttgagccgcaaactttcacaactgacttaacaatccacctacgctccctttaaacccaataaatccggataacgctcggatcctccgtattaccgcggctgctggcacggagttagccgatccttattcatatggtacatacaaaattccacacgtggaatactttattcccatataaaagaagtttacgacccatagagccttcatccttcacgctacttggctggttcaggctctcgcccattgaccaatattcctcactgctgcctcccgtaggagtttggaccgtgtctcagttccaatgtgggggaccttcctctcagaacccctatccatcgttgtcttggtgggccgttaccccgccaacaaactaatggaacgcatccccatcgataaccgaaattctttaataaaaatatcatgcgatattcgtatgctatccggtattaatctttctttcgaaaggctatcccggagttatcggcaggttggatacgtgttactcacccgtgcgccggtcgccatcttcagtttgcaagcaaactaaaatgctgcccctcgacttgcatgtgttaagcctgtagctagcgttcatcctgagccaggatcaaactcttcattgtaaaagtattttttatcatccattaggatgatctttttgctctgttcaggacgccgtaaatttattgaccttattcaaatacctattagtcttaattgtatcactactgaataagacaagtattgacggttctatttttttacttgtactacttgtattgtttatcaatatttcaaagaacttgttgctttcgtttttaaaagcgggtgcaaaggtaagggctttatttttaaccaccaaactttttcggaagttttttttagtttttctttttactcgatttctctggctctctatgcgaaagggaaagaatgtatgaaagaataactcttgccaattttctttgcgaatcggactgcaaagataagaactttatttattataatccaaactttttcggaagttttttgttcttttctttaagtgggattccactttttcactaagtcaatttttcaaggctttcttctcttggaaagcgggtgcaaaagtacgcccttttggtatacactccaaatatatcaaactattttttctaattatttttgaatacatttgctaaagtgctgacgcataacgatgttgtagaacatattttttatgtatagggaaattgtgcgcggaaacgacgagagggatacacattattatatcacacgcgggcgcgtgaaggcgtgaaaagagaatgaaaagaaaaagacgaaaaagaaaactacaagaaaatagatattagaaaaaagcaagaggatttagaatcaaccgtcagaatactttttctaagcggtctaacggttggctattccataggtatagatcggataaatacagagtgggtactaatcagattctaactataaaatcagaatgtcattcttttttagagttctctattcgcaggctgacaagttcaacccacttctttatgcccaaatcaaagccgcctttttctaacagatgaagggcgcccgcataatgaagggcagtctcctccctactacagcttatcttacaagacagtttacccagatagtattccagccgggccatttggatatagtccaataaagtataatccccttcgattgacaaatcaatcaactcccgtatcaaagcataggctagttcacattccgtataggttaaatccgagaggggtttgtacataacaggatgctgagtcagctgaacaacaattcgattaaagtctccgtacataggttgcgtttattaccgcatcagttcccggtggtgcgagggttataaaaaaagagagcgtggaaactatctattcatgccatatataggtatccgctaagacccctttcgtgaacatgaatgatagccccacgcccaattggatatataacaaggttatacagacaatagtgcgtgagacctgtcattcattccattcacgaaagttaaaatttagcggattttatatatgaatgtaacaaataaccgttctcaataaaattattaaaaaactacttccttcgctcgaaagtaagttatcacaaaagtagaaataaatatctattaaacaaacaattttgacaggaaaaacatgatagatcaattaattcagtctatatcgcataaaaaacacaaacccaatatcctactagaaacaatttctcattttcatttctcatattctcataacatgcacaataatcttctgtaaatcaacaatataacacaatgagaataaaaatacaaaacggcatttctcatagtatgacccgcattttgtacataaaacaacctatttctcataacttatcaaggtatttctcatagtattttgactatttatcctataaattctcaagctagatcctaagctaaagaccaagttgaataccagaccatgcacctatttacaatatatcatcagtgcttattggaagtatatagagcaggtatccgcatatttttctaccgcagggcagacgcattaaaaattattttcctgtaaaagttgtgacaaatatttttcatcccatcccgcttttagtcttttcagattcatgcttccttttgttgttttctcattctttagtatggtaagtgccatttttgttgccaccgaaaagtttctggctgcatttttcacctttttactgtagtcttctcgaaaggtaacatccagttgccaatgaagattattctcaatagaccaatgctgcctgatggcagatgcaatctcctccggtttggtattatcaagtgaagttacatagtatctgacctcttgagtatattctcctgttgctactattgttctctccgactttatccctacaatagacttcaaccccacaagtttcttcttaaacattttctccataatagatccataactgactacagtacatgttcttgtctcaatccttccatgtccggtgttttccgacacatgcctggtgactctattggttatttcatctctatcctgataatcgtcaatgatttgtttagctagttgataattttttttcttattctcctttatagctataatataatttgcattatgctcaataatggtctgggttatatctttctggcatcccatcgcgtcaattgtaacaatacaaccacttagttccaaagagttaattaacaatggaatagctgtaatctcattgcttttatcatctacttttacctgacctaaagaaattccattagcggcagaccatgcagaaaccatccataatttgaatccttcttttcccgtagtatgttctccgtcacattggcttggaccacgcatgagcttgccatctatagcaacaacgcctttcacctcctgacagacttgttttacccaattacggaagatcaactcaaaatactcgggctttattatactgaagaatctattaaaagtatcatgactagggatgaactccagaccaggtatgcgacttttgaaaaaagcaattttcgcattgccaaattcctcaatctcattccaggattgagcgccacagattacagcagcaatggatatatagataatagtttccattttatgtacttttttgcggttcatcctaggatcttctatttgtttacaaaggtcaattatgccaattttcatgttagtttatgttttaatatatcttataaagataaggaaaataatcgacattagcaaatgataatatgttaataaccaacaatatagtaaggaaattacaaacgagaatatagtaaaaaatataatgcgtctgccctgtcttctaccggcatctatatcgttccactccagtggacaggcctgtgcactagagtagaaagaaccgtccactagagtggaacgatctgttcactcgagtgcaatgatacagatagtagcaggaagtgagtaagggaaaacagtaagatataaggtgaatgatacacaggaaagcagtaaacaataggaagttgattaataaacgacatagggaaaggaataatcgtaagtccggcgagagtccgggaaaagctgcagccatcatgtatgagaaatgagcaaaacaaataagaaggagtatgagaataagatgagaaatgatttgaaacctatgagaaatgcatcttttttaggggtaaatgatggaaatactatgagaaatgccatttcacagttcatttctcatagtattgatttacaaactattatcatatcatttatgagaacatgagaaatgaatatgaaaaaacatttgcagaagctgaattcagcggagactgctgaattcaaattgtaaatacgacacctccttatgaatcaggctgaatttatccgggtaaaatttgctctatttctttcaactcgtctgccgtgaactccaaatgttccagcgctttcaaattgtcggctaactgattcacagaacttgcacctacaatcactgatgtcattctttcgtctttcagcacccatgccaaagccatttcagccagcgtttgcccacggcggcgggctatttcatttaattgacgggcagcttctaccttttcatgcgtcacttgagattgttgaagaaaacccgaagaacgggcagcacgggaaccttccggaatgccgttcagatatttatcggtcaataatccttgtgccaaaggagagaaagctatgaagccggaaccgtactccgctgctaaaggaagtgattcagcctcaaccgcacgatcgaacatactatatcgatattggctgataagacagggaacaccggcttttgccatcatctcataggcaacacgggcttgttcgggaggatatttagaaattccgatatacaatgctttaccttgcttcacaatatcaatcaatgtctgaatggtttcttcaactggagtgactccgtcataacgatgactataaaagatatcaaaatactccaaacctgtccggcagagactttggtcaatgctcgccatcagattttttcgagagctatttccgccataaggacctgcccacatgtcatgaccggccttggaagagataatcatttcatcccggtagccttgaaagttctctttcaagattcgtccgaaatttacttcggcacttccgggagcaggaccgtaattatttgccaagtcaaaatgagtaacaccgtgatcgaaagcatacttaatcatgtcggttgctacattgaaattgtccacactaccgaaattatgccacaatcccaaagagattagaggtaactgcaagccactcttgccacaatatgtataaggcatctgttcgtaacgatcggctgccggctgataactgaaagagttttccataaagcagaatgtttatattttcctttcacaaagaaaggaaaaatattccaattacggcttcaaccggatattaaaaagaaggcggatcagaactggaaatagataaacggctgaatctccgaactcttcatctgaataacaaggtaaatcaaagctatcatcaacactgcttttcctacgaacggtagacggatcactccccggcaagctgcattttcccagctatcgggagcaaaatgaagcaggaagccgaacaacattaatgcgaatactttccaatatccttcaagtaactgtgggaacagttgcggacggaaagtagtgaatatctgtcccagcatatccattgagttctgaagatcggcattacggaagaaaatccagcagaagcagacaaaatggaaagtaataaccactccgaatacacgccgccaaccatgactttgttctcctttcttacgcccggtgatggtcatccacattttatgcaatgctaaagcaactccgtggaaggttccccaaagaacgaagttccaagatgcgccatgccataatccacccagaaacatggtaatgataagattcagatattgccggaacttaccttttcggtttcctcctaaagaaatatacagataatcccgcagccaactggacaaagagatgtgccaacgacgccagaattcggtaatggaggcagacttataaggagaattaaagttgagattaaaatgaaagcccaacaataaagcgataccgatagccatgtcactatatccggaaaagtcgcagtaaatctgtaaagcataaccatacactcccatcagattctcaacacccgaatagagagtaggattatcaaaaatacgttctacaaagttgatgctgatatagtcggagataatggctttcttgaaaagaccggatacgatcaggaagattccgcggccgaacatctcctgcgaaacaaagagaggtttccggatttgcgggataaaatcgcgggcacgcacgataggtcctgccaccaactgggggaagaaagatacgtagaaagcatagtccaaaagattcgtcaatggctttatgtccctccggtaaacgtcgatggtgtagcttagcgactggaaagtaaagaaagagataccgaccggcaggaatatatcaagggcggtaaactctcctcccatcaatgacgctatcactccacccaggaaattggtatatttgaaatagacaagaagtcccagattgatactcagactcaaaactactaatcctttacgtttccaatacccttctgcacgatccattagctgtgcaagaaagaagtcggcaacggtgactatagcaagcagaaagaagtatgtgccactactcttgtagtagaaataataggaaaaaagggtgacaaacaagatacgggcagtgtatttacgttgtaacaacacatacactaccatgaaagcagcgaacagccaaaggaagataccgctgctgaatatcatcggggcttgcggatcgtaggtaagtacctcttttagtctactgaaatctatatcaatgggaaacatagtcattatatgcttgtataagtgcttggtataataaatttccttgcaggatgtatccttcaggtaaataatgtacatgatcgggacgcatcaggtttgcctccgtccagttggtgcaggcacgacgcttccctccgactacatcatacatatcccacacgagcaggcgatggtctttggcataacggcggatagtttccgctgctgttgccgtacggggattgatggcatacgtgcgtctacgcctccgttgccggaaactttcataggaaccgggaggggtagtcagaagaatggggatgttaggaagactgtcgcgcaacagtttcacaagttcatccatctgattgtagtgcacatttatattataacgccggttatggctttcattggttccgaaagagagaatcagcaattcgggtttcaaggcagcgatttcggtaatacgatccggatgggtaaatgttaggcaagtagctccgttgacgcctttatcaatataagaaatggcaccaaaggtttctgccaaacgggcaccggtggtttggggatagatatgtccacgcacgtggctatcgccaatatgaacgatgcggagtgtatcttcggagagtccggcacgtacctggcggagatgttcaaagacgggagccagcagagcaatgctgtcaataatctcattccgtccggtttcgcgaaaagcagcagggaaggctacttgtacgttgatcgtatcattcgcccagttcatttcccgtaaaggctttatccgctttgcagtctttcccaatggagagcatacaggcatacggtcttgcgcgattgtttctgtaagaaaacaagggacactcaacataccggcgagaatgagaataaagatggacagcaggttactctttctcataagcacgcctcctgtcgtattgttccttaccatagatcatggtttcataaagcaatccagccaaatgcttaccgccacggaagtttatatgcgtataatcgtagtttgccatagagggtttggcatggacgagttttgccatactgccttctccgcccattgcttcaaacatattccagaatgcaataccgctttcagcagcaatgttctgctgataacgaatcagattcttaacaccgggcatggtacggagttcgccgttttcgttcttataatcacggtcgccaacgctcaataacagaattccggcttgtgggaaacattctttcagatgctcgatagctgtaatcaatcctttctggtaattatcataattgcgtccccgttcggtagctacattcaatccatattcgaggataatcaggtcgtaaggacgctggcggttaaactgcttcaacgtttgtaccggaataccgcgcagggaaagaccggaactgccacgcaacgagaagttatcgagaatgattcctttctttccatccattgccaagccatagaacagggcagagtccgcacgatctactgtccaacggatagaaccgatgcgtccgtccacctgaacttgttgtaatccatcagaagggcctaaagagtaattcttgctttctcctttgttcacacgggcagaaagaagaacggaatctttattatagaagaagatagaagcacgttggcaagtatcgagcagggaggcgtatttattttgtccgcgtagttctacataagctccgttccgggggacaaaatagtgtccggaaatgccttgtttcttcttatcgaaatagatactgtctgttactgcatggctggaccatccgccaaatgtatgccgtaccgtaggacggtaaccgcttgtcatggaagtgatggtaacaaaacctacaccacaaccgccgaattgtttctgaagcatttcgcgcaagtcggctgtaaatatatccgcttcgataaaagagtctccgaatacggcaatgcgtacctgtttgtcatcagagtcatctgaatcactggaagagatacgattgagtgcttcataaaaaggagccatcccccggagggtggaatcactgtaatcttcaatgcaagtcatacctgcacgacaagtatctacaaagaccggctttacaactggaggcaaagggatactgtccgaatcagctgtggcaatctccgattccggataacgaaggtcgctcaaaaggtctacacgcctcatcgtgtgcccgtcaatggtcagtaccggaagccaatgaagcccgagtaaggctgcaaatacaatcagtacgaaccacaacgaatatttcaaataattctttattatctccataatgtttctaaaatcccaaacgaccgcaaagatagacaaaagccacaaaaagaaaggagaatctacattatttattagattctcctttcctttttatctatctaccggatcacatttaaatggtccgttcaatgttccacacaaatgcacgcaaacctaattgttccgtctgcaaatccattttatgcaaggtgtcgagcaatgaatcgactttgttatcttctaccactgtcaggatagccgagcacatacttggccaggcatggcttccgaaatgcggatcgcctgttttcgaaccacgtccctgtactttttcaaggtatgtaaagccacgacaacccaaacggtcgagcaacgccatgattcgttcgtaataagcctggtcgaatgttatcaatactgatttcatatttcttttctgttatttcttaataatgttatctttattcgcctggaaataaacgtccaattcacgttgacggcggagtttacgacgacggttcttgataccagttcccgcgaatacacaatatagagtaggaatcaaaatcaatgtcaaaacagtagatatcgtcaaaccaccgattacggcaattgccatcggactccacatttccgaaccttgaccgccaccgatagccatcggaatcataccgagaacggtagtagcggtggtcatcagtaccggacgaagacggctcttacctgctgttaccacagagttcaaaacagccaatccacgttctcgacaaagggtaatgtagtcaataagcacaataccgttcttcaccacaataccaatcaacatgatacctcccaataaactcatgacactcaatgtgctgttcgtaaagaatagtgccatcaagacaccactaaacgcaaacggcagggagaacatgatgataaacggataagtcagtgactcgaactgcgctgccatcacgataaataccagaacaacaatcaggatggcaagtgttcccaaatcgcggaatgaatcctgctgatcttcgtacgaaccggaaatctggatggtgacttctcccggaagatccattttatctatcaccttatttccggcagccactacgtcgcccagcggagctccggagattacagcggaaacggtcacgatacgttcgcggtctttacgttcgatggtaggaggtgcaaaacgttcgactacctttccgacgtctttcacacgaacggattgtccctgtgcattgtaaatgaggatattttcgagactctccaggcttgtacggtattcaggtgcgtaacgcactttgatatcatattcatctccgtcctcacgatatttagatgctaccgcaccattgacacggttacgcagatagttaccagcagttgaaagattcaagccatgcatcgccagtttttcacggtcgaagtctacctggtattccggttggtagtcactacggctgatatttacctcggtcacgccttttactttcaataattcacgtttcagacgggctgctacgctatcggttactgtcatatcgtatccgtaaacctcaaagtcggcacttgcctgcgcggacatacccgtgttactacctccgaggattacctgtgctttactgaattccggataggctttcaaatcttcacgcatctcatcacagactgcttccaaagtgatgtcacgatcacccgggtctaccaaactgatgttgaacgagattatatgtgagccattgtcctgcatggatgcccaagtgttgtcagaatcagcctgaccgactgtatagttacagactttcattatgtctttatacttcgtcagccattggttggttaacttctgagataattcctgcgctatctcttttcgtgtaccgattggaagttccaactgtacggcaatacgggcattatcctgtgccgggaagaactccgtaccgatgccctttgcacacagcaaactgacaacgaagaaagcaatacatcccacaatcacaatcggacgatgacgtacagcccagttcaacatcttcgcataccaagtatcaagtccgtcgagcgctttctcaatcggagtaaagaagagcttgaacattttcgatggtttcttctgcaagcgaagtaactgagaacagagcatcggagtcaaagatagtgcggcgaccgtagaaataaacatgatggcacacatcatccaacccaactgtttgaaaagcacaccggacataccgcttaccatcgtcaacgggaagaacacggcaatcatggtcaacgtagaagcaattacagagattgccacctcatttgttccgtgcacggctgcctgtttcggatcggagccacgctcgatatgggtcgttacgttttcaagtaccacaatcgcatcatccaccaccataccgatagcaatagaaagtgacgaaagcgaaataatattaatcgtatttccactaatcgccaagtaaatgaacgaagcaatcaacgaaagcggaatagtgatacagataatcagcgtcgcacgccaacgtcccaggaagaggaacacgacgatgacaacaaagagcaaggcataaacaacggtttccgtcaaactgtcgatggtgttcaaaatgttgtccgaggtatcgacaatgacaccaatcttcacgtcgctcggcaggttcttttgaagcctcggcagcgcgtcggccactttcttggagatttctaccgaattggctcccgactgtttctgaactacaatcatagcaccttgcacaccattattataggtttcctgtgcacgttcttccacggtatcgacaatacgggctacatcacgcaaaaagacattcgccccattgtgtgtacccaccactacatctgccaactgacgggaatcatcaaactcaccttctacacgcagtgcataggtttcgctaccaatatcgaagttaccaccgggaatgttcttattctcggctccgataatggagctgattgtttcaatagtcaggtgataggcttccagtttgttggggtcgcaatatacctgaatctcacgttgcggtgcaccactgatggagacggttccgactcccggaatacgtgccagcggatttaccacacggtcgtccaatatcttataaagcgctgactgactctcattggcctgtacggaaagcaacacgatcggaatcatgtccgtactaaatttgaagatgatcggattctcgacatcatcgggaagctgtgagcttaccatgtcgagtttatcgcgcacatcattggtgagaacgtcaatatcgttaccaaactcgaactccaatgtaattaatgacatattctcggaagaacgggaggtgatatgtttcaggttgctcaccgcattcaacgtattttcgagcgggcgagtcacattattttctatatccgaagcacttgctccgggataagcggtcattaccatgattgtattcgtgtcaatgtccggatacaagtcgataggtaacttggacaaagagaaaagaccaaaaatcaccactgccagaaagcagagggaggtcataatcggtttcttaaccgcaccttcgtataaactcatgttgttttatttaaaagcctctccccactcctctcccaagaagaggaagccggaagatcgttttgaaatcaggttaattaataaaagcattgggagaaaggtactgtacatctctcatttggaagaaagttgggaagaggcttccacctctacttccataccgttcaccaaacgtgactgtccggcaactacaacctgtgagttatcgggcacaccggatttcaactcgtactccgtacccatgcgtctacccagttcaaccttattataagatactttaccatctttataaacgaatacataacggtcgccggaacctgcctgcttaacgatagccaaatcaggaacaactacgttttctgctgtaccgaagttcaatgtcgcacgggcaaacattcccggacgcacacgctggtctttattatccagtctgatctccacctggaatgtacgggtagtagcatctatggtagggtaaatcaggttgatggttcctgtaaagacttcatcaccatatacatcgagtttcacgtcgacaggagtaccttttttcactttcgtgaagtaggtttcagacacgttaatcaggagtttcacgggagtgatctgttctactaccagaaccggttctccaccactgtacatatcgccattatcatagttgcgcgcagtgactacaccattgatagggctttgcaaagaggtattctccagcagattcttataagcggttttcttcacatcgagttgcatcttcgaagcatcccactctgatttggacgcaccgcccactttatataattcgtcgatacggttgaattctatttcctgattatctagttgcagcttcgtctgtttcaggttggctgcatccatctgcacaagtttctgtcctttggatacgcggtcgcccacttctacgaaaatctgatcgatacgtacgggagacgaaggcgcaatattattctttacttcggcttccaccgttgctgtgtaatcctgtatttgatctacggggcgggcttttacgtctgccagcttcacaataggctttgcgtccacatgttccgcagcagctttgtcttttccacctgtacatgagcccataaacacagttaacagcagggctaccaattggatacttcttttcatattccttacttgtaattttttagttgtctatctttattcttttcccagaacctgatcgaggtctgccttagcaaccaggtaatcgtatatggactgattgtaggtgagttgcgcctgtgtcagtgacacttgggaactgttcagttcgagcaccgtgcccttacctacatcataacgtttttcggcaatcaccaccgctttctttgcctgcatcacattttccttgttgctgactacctgctctgtgctggcactcatattattgcgacaactgacaatctgcatattcaactgtctttccgtatcgatacgattccaatcgagctggcgcatctggatacgggcagatttcactttcgtaaaattgcttgccttatataaaggtatgctgatattgaacatcaggctggaactgttgctccagttataatcgaagaaattgatattcggattatacaatgactgatattgataggagaagctcatggaaagagtcggcataaagttcgtctttaaagactttacattcttttcgagcaacttcatgttcaagtccaactgcttcatggtggtattgttgttcagattcacattctcttctttcaactgattggcaaacatggtcgtctcatagttggtcagattatcattaatctttatctccacatcggcagtgatgcccatcagaacttttaactgtaatttagccaaagtcaccgcattggctgccgcaatcaggttcggcttaatgctgcgcatctgtacttccgcactgatcttgtcatattcgctcacagttccctgctgatatttggcattcactacattgtaattatcttctgccagtttatagctgccttgaagcacttcatagctatcctgtgcaagcattaactgataataagccttgcttacctgattcaccagatccagtttggaagcacgtgacttctctactgccagttcaatatccgtctttgtcatcgacatagcacggtaaacacccggcacaaagagtggcaggttaatactcaacccggcattggcggtgttcgaaccgtcttgccccatcttgaacgacatatcgttcaatttcatttcagccgctttaattgtatggtctaaggaaccggcaatgctggcctccggcaacagactttgccaggcttccttgctggcaactctctttaaggcgatttcttccgctgccactttcattgtcggattctcatccaatgcaatttccaaggctttgtctaaggttaaggttagggtattcttctccgtctgcgtgtcctgcgcctttgcaaaaccaaatgcacagaatgccacagctaccagaaggatcttccgacctgtcaatcttttcatcttgttcataaactgaatttctaatttaatcttaattgtttgtcaatagaacctcacttttactctagtcttcgatgcggttcttgcgatattcttgtataaagtcttccagtacccttgctcctttttcggtggagataccgcgtatataagtaaacatgatggattcgtacacttcaatgaaagggtattcattacagatgtccgtattcaaaagcacatcaaattgctcacgtaccagcaaattgacaatagcgaagtttacatccgaacgaaagatgccctgctctactcctgttttgaagaaggacatggttttcatcgaatcgctgtcctgccgattcttcatcatctcatatactttgggatatttcttaatgtcttcaaaaaagcgtttgttcgtctgatgaaacatctcaatgcttttctgaaagactgcaagtatcacttccaacacattgtgcgactgttcaaagactttctgcaaatacttgtctctgtctgcctgtgccttcagtatgcattctttcaacaacgattctttatccgaaaagacttcgtagagcgtacgtttggaaattcctaatgctgctgcaatgtcatccattgtaatactcttgatgccttttgaagtaaaagcttctgttgccgccgttatgatccgttctcttaactctacccgttgggaagcgtcctttccatgctctgtcatcatccgtttttctattttattaaaatgcagttttcgttttctcttcatttccaaaggaaaaacggaacaaagatatatagaaaactcaatcaacaaattaagtttccagctatttatagtccatttgggatttattatcattcaatagagtgaaatgaaaacaagtgttaataggaaatttggaacaaacacaaaggaaaggtaaaaggagggaatataggaagtaaagttttatcgctaatagaagagatgggagccaataaatgccggataaatatcgataagaatcgacacttacccggcaataacagtcaccattattaacgaaaagcaaaaaagggtcaatttattgtcagtattcaatctgtgtcctcttcaggaaggcgactgttttatgtatttccttgtacatcacaatgtcatcttttacaaaaggcacttctttccgataggcatggaggaaacgctcaagaacgggagaggttttctgcgggcggcggaagtcgatgccttgtgcggcgttcatcagttcgatggcaaggatatgttccaggttgtccatcactttatagagtttggtggcggcattggcacccatgcttacatggtcttcctgtccgttggaggagactatggaatcgctagaagctgcatagcagtacattttattctggctgaccatggaggcggcggcatactggggaatcatgaagccggagttcagaccggggttggctacgagaaattcaggtagtccacggagtcccataatcagttgggagacacggcgttcggagatatttcccaattcggccagggcgatggcgaggaagtcataagagatggcaagcggttgcccgtgaaagtttccaccggagatgatccggtcttcatcggggaagatggtggggttgtccgtgacggaattgatttcggtcagcagtacggaggcaacgtagcggatggcatctttggtggcgccatgtacttgtgggatgcagcggaaggaatagggatcttgcacatgttccttgtggcgttcgattagttcgctgcctgccagtagtttgcggaaggcttcgcctgtctcaatctgtccctgatggggacggatttgctggatgcagtccataaacgggtcgatacggccgtcaaaggcttcgagggaaagggcggctatcaggtcggcctttttcgagaggcgaaaggctttgagcatagcaaacacaccgttggcactcataaattgggtgccgttcagcagggctagtccttctttgctcattagtttgaccggttcccagccaaactcgtcgagtacgctgatggcttcgcacttttttcctttatagtaaacatcaccgacacctatcagaggaaggaaaagattggcgagcggtgccaggtcgccggaggctccaagggaaccgcggtcgtagacaattggcatgacgtcattattgaaaaaatcgaggatgcgttgcacggtgataacttgtacgccgctatgtcccaatgagagggcgtgggctttgagaagcatcatcagtttgatgatgacggggcggatttcttcgcctacgctgcaagcatggctttttatcaagttctcctggagggttcccagttcatcgggagatatatttttagtgcatagagagccgaaacctgttgttatgccgtataatggttcttcggaagaagctattttttggtcgaggtagtcacggcatttctggatgcgtaacttggcttcgggggctagttccagtttcaggttttcgtttataattcgttcgatgatttcgaaggtcagtgctccggaaccgatatggtatacattcttactcatacgcgcaggtcttgatttacggcatccaacaattctttttctctctgacaggcggtttgctcgatggcatcggcttcggtttgcagctggaggacaaaatctctgtctttgagcgaaccgaggttaatacgaacattcagcaaggctcccaatacggcggaacgggcagacatcatggctacacaggcgtctgtgacggcattacggttacccaaacgggcaacatctgctatgacggacatcatatccagtgctttgcgggctacttctaacgggacgagggcagcttgtttggttgcttcctgaatggcggcacttcggacagctttctcttcgtcggttgttttaggaagtttgaagcaggcaaagacttcgttgtaggcagcggaatctttatcaataagtgcaataaattcgtccagtaagcggagtgtgattgtttgtgcgtgttgcattacttcttcactggcttcgtatcctttttttcctacggtgagccgtgccaccatcgtggaaagcgcggaagccagtgctccattcaaagcggcaatactgccaccaccgggcacagggtcactgcaagctactttatctaagaaatcttttacggttaaatctgctaacatggtattcagttttaagtgattaatgaatgagtggggtaactattaagcgacgggatataacatgccgcctttaatagtcatgattacacagttcatgcctatataataaggtagaatatgatagttgtcggaattgagaatgatgaaatcgccttgtttgccaacttcgatacttccaatacggtcggctcgttgaagggcggcggctccgttcagggtcagggcggtgatggtttcttcgatgctcatttgcatatagatgcaggccaaagcaatggtcagcgggatggaaccggagaaacaactgccgggattcaggtcggtagcgagtgccacagcacaaccggcgtcaatcatttcacgacctcgtgcgtagggttctttcagggcaaaagctgtcaaaggcaacagggtagccacaactccggcatcagccattgcacggatgccggcatcggaagcatgcaggaggtggtcagcagatagtgctcccagttcggctgccagttcggccccaccgagggagacgatttcatcagcatggagtttcaatatgaaaccgtgctccttggctgcctgaagcaggcgacgggattgttcgatagaaaaaacaccttgttcgcaaaagacatcacaacattctgcccacttaccggaatggataaggggaagcatttcacgaatcaggaagtcgatgtattcgtcgcttctccctgcatattcttcgggaagggcatgggcgccgaggaaagtggagactatatcgacgcgtttatgctcagcgttattcaggctgcgcattacttttagttgtagtaattctgtgtcccggtccaggccatagccacttttaccttctacggtggttactcccatagtactcatcttcttcaggaagctttcggcggctgaacgaagtttaaggtagttcatttgccgggtggcttttacggtacttgcaattccccctccccgctccatgattgacatatagctttcgcctttcagacgccaggagaattcttcggaacgttctccaccaaatacaaaatgggtatgggaatcgacgaaaccgggtaaaaggcaatgtccgcgagcgttataatgccaatagtgctggtagtaaccatcccggtcttcaccacggttttcaccaacgtaagtaatgattcctttggtcacttccacggttccgttttctatgatttgcagttgagacatttcctctcctttacgggcggaaaagccgatgggggttacgatacgggcgttaaatatgattaggttttcactcataaatagttcatcataattagttcatataataaatggagatatgaatagcacgttttttagaatgatgtttgccataaagcaattgtgattcattttattttcttattgactattccatgatacgagcttcgagaacttgctgcatggtaaagttttcgagtccgagatagtaggaagcggtatcaatcaaagcttccatcggtacaaggccgattatttcgctacctacaatcgtaacaccgtaacgacgggcttcgatacgtactaattcgaaggcacggtaaagtgcggtacgggtatagtcggtcatgttaatggatacttgggtaatgtttcgctctttcagttccacccccattgcttttacataacgaagtcctccattgatatggcggatacttttcgcaatcttagtggctatctccagattatctgtacttagattaatattgtaggctacgagtggcatacgggctccgattgctacggtacctgcggtcggatgtcgttcagcaggtccgaagtcaggttgccattcgggtagtttgatcttttcggccattccttcaaattcacctttacgaacggaggcgagattttcccgatgtggcgcagtagcggacttttcatacaggaagacgggaagattatatagctccgcaactttcgctgctacttttttagagagttcgatggcttcttccatactggtattcttaatcgggatgaaagggatcacatctaccgctcccatacgaggatgttgcccggtgtgctgattcaggtcgatcaaacagacagctgcaccgacggcttcaactattgcttcatacagtgcttccggttctcccacaagtgtgacgaccagacgattatggtcttcatcattactataatcaagcagttttactccggctttagcacggaaaggggctactatctgatctattttctccaaatcacgtccctcgctaaaattggggacgcattcaataatcttattccaactcataccaaatatctattattatagaggttatactttactgaataactatatgttttacatcaaatagccacatggtttattcaaaataaccgcatgtttaaactgttccatatattgtgggaatttactccctcatattatgggaatgttttctcttatattgtgagactactttcccacaatagatgtaaccatcttctttattaattcttcgtccgccacatacggcattgttatctgataatctccagcatgggactcattaaatgcctcactcgtttccatcgcatgcggattacgcgcccacgaacggcgggctactcctcccattacgtcccaaagcattgccgaacgaagtatttcatctacccgttcgctaccgtcgcataccataccaaaaccgccattgattgctttaccaatgccgacgccacctccattgtgtaaggctaccagactcattccacgggcacaatttccggcaaaacattgcacagccatatctgccatcacattacttccgtctttgatattcgacgtctcccggaaaggagaatccgtaccgcttacgtcgtgatggtctcgtcccagcataatagggcctacttcaccccggcgaaccatctcattgaaacggagggcaatgttcattctcccaactgcatcctgatacagaatacgtgcctgtgtacccaccacgagctgattcttttctgcattatgtatccaattgtagttgtcaagatcctgtccgcgccggttgacgtcgatacattccatagccgcatggtctgtttttatcagatcttcgtgtttgccactcaagcaaacccatctgaacggaccgtagccgtagtcaaagagttggggtcccataatatcctcgacataacttggccagataaatccgtctttttcatcaacaccattataggagatttcttttactccggcatcgtatatggctttcataaaagaatttccataatcaaagaaataagttccgcgggctaccaatttcttgatgacttcgaaatgacggcgcagagatatgtctaccaagtgacggaattgctccggcgattcgtgaagaaggcgtgtgcgttcctcgaaagtcagtccggctgggcagtatccgccttcgtaaacggcgtgacaggaggtttgatcggataatagttcgatcaaaatcttttcgcgctcggcatattcgagcaggtctactatatttccatgataggcaatggaacaaggttcacgacgtcgcattgcttcagttgccatccggtatgcttctatgatatctgcagtcacatgccctacccatccctggcggtagcgtgtttcaatgcgtgaacgatctacttcggctatgatggagactgctcctgctatttcggctgctttaggttgtgcaccactcattcctcccaaaccggaagaaataaataagtgtccccgcaaatcttggtcttgtggaattccgagtttcaatcgtccggcattcaggagggtgttgaaagtgccatgcacaatgccttgaggaccgatatacatccaaccaccagctgtcatctgtccgtaattggcaactcccatctgggcggcaatatgccaatcatgttgattgtcgaattgtccgatcatcatcgaattggtaattataacgcggggagcatcgggacgggagcggaaaagccccaatggatgtccggattcaataaccagtgtctgttcctgggtaagttcttccagatattgcttaatcagtcgatattgcatccaattttggcaaacttgcccggtttcaccataagtaacaagttcgtagggatataaggctatatcgaagcaaaggttattgtcaatcattacctgaaaggctttgccttcaatacattgcccctgatattcatcaatcggctttgctttcaagtctccggcaggacggaaacggtatccgtaaatccgcccgcgagtgcgtagttcttccataaattcaggagccagttgttcgtgccactcggagggaatataacgcaaagcgttttttaaagctgtgatggtctgcgccggggtaagtgtataaccacggtcgggagctctccggataccttctacaaaatccggataaggaggtagcgtgttgccaagagttattctcataataaacagaattaaggattacaaactgtaagcaatacagtcttataactcttcgcaatatagaaaaaaagaagataaaagacaagagaaataacagatttattatcagaaaggcattattacatttactgcttaatagaatggtaagatacaggcaatgtcaggagtctcttatgcttttatacagatacaaatgcaggtcttttatccaaacggactaatagggcttttattaaaatggatagcggatttttccattaaatcaaagccatgagttctgtgttatttgcataatccgcaccctaatcatatcactatgaccatgattgtattatgaacatactctttctctgctataccaacagagatcgacaaaattactttttttgtttattccgcaactccaacaaatatttaaaggtatgcttcgcctcctgactatcatctttcaaatatgcctgtttcagttccggataattctccaataattgaagcattttatcttttcctagaaaatcgacttttcctgtttcaccatttagctcataacagacgcgtttcgtaaccaaacttgaagcggcaagagcatcgccaatattccctcccagttttacgtcatcctcttctacaaagtttcctccgataaccgagcctagaggcatggcacaaaaatagatatttttacccaattgaacggcaggggcataccatgctccaaagcgtaactttttatagcgcaacttacgacaattcaaatataaatctcctttttcgtcacgcacggcaaaacaacgcttcttcaagcgtcgacacatcaactcgtcatcaccggccgttatccggtaatcagcccctcctgtcaatacaatctgatttctggaacgtttttctacacgcaacacggctgtggtatcaccatgttgagccagcaactctttcaggttggaataaataatattctgcgcaattaacggaaggctaatcacgcttatcagcaaacataagatacatcctttcttcataagcatcctcctttcctgtctaacgccttttcgagtggaaagttataaattttagcggataaatgcaagaatgagaaaagaaatattgaaaaaaagctgctatcaggaaatgccccctactcttattaaacggaaacagaacttatataccccattccttacagctaataaaggcattatccaaacaagtcataatatgagcttgttattcctttctatcttccgttaataaacagtaaatctgctctcgacaaaaacaagctcttatcccgaccgtcatgaattatattacctttgtggaaaagaattaaatttgtcatggaaaaacaagaacagatcattactacatatcagcaaatcattcagaaaacagaactggagttacagaatgcacggaaacgtatctattatatcagtcttctccgcctgatcttattcgtaggagctgtagcaaatgctattatcttttggtctgatgggtggctatgtctctctgctttcgctatcttaccttttatcttattcatctggctggtaaaacgccataatttctggttctaccgaaaagactttctgaaaaagaaaatagaaatcaatgagcaggagctacgcgccatgcaatatgacttttctgattttgatgatggaaaagaatttgttaatccatctcatctctacactcttgatttagacgtatttggcgaacattctcttttccaatacatcaaccgcactgcaacgcctattggcaaacagcatcttgcaagctggttcaatgcacatctggaaaacaaagaagctattgaacatcgccaggaagctatacatgaattgtccacagacctagaatatcgccaacaaatccgcttgctcggcttactctataaaggaaaacctgccgataccaccgaaatcaaagaatgggcaaacagtccaagttattatcggaagcgtacgcttctacgcatcctcccgacagcggtaacgatcattaatttcttatgtataggtctagccattttaggtattatctcggccagtattgcaggaggagtgtttgttggctttgtattattcagcactattttttctaaaggaatcactaaactacaaacgacctacggagaaaagctacaaattctttcgacatacgctgaccagattcttctcactgaacagaaagaaatgcaaagtcatatactgcaaaagttaaaaacggaacttacaagtcagaatcaaaccgcttctcaagcagtacgccagctttcaaaactgatgaacgcgctcgatcaacgaagcaatctgctaataagcacgatactcaatggactgatattctgggagctgcgccaagtgatacgaatcgagaagtggaaagaaatccacgcatctgaccttccccgctggatagaaaccatcggagaaattgacgcttattgttctctggcaacattcgcatataatcatccggattacatctatcctaccattgctgctcaatctttccatctgcaggctgaagctttggggcatcctttaatggatcgcaacaaatgtgtacgcaacggaatagacattgaaagacgtcctttctttattattatcacaggagccaatatggcaggaaaaagcacgtatttacgtactgtaggagtgaattatctactagcatgtataggggctcccgtttgggcaaagcggatggaaatatatccggctcgcctcgtcaccagccttcgaaccagtgactccttagccgacaacgaatcttatttctttgccgaactcaagcgacttaaattaatcatagacaagcttgaagcaggagaagaacttttcatcatccttgatgaaatattgaaaggtacaaactctatggataaacagaaaggttctttcgccctcatcaaacaattcatgcacatgaacaccaatggcatcatcgccactcatgacttgttgctaggaactttagtggactctttcccacaaaatatccggaattactgtttcgaagctgacatcacgaacaacgaactcaccttctcttaccaaatgagaaacggagttgcgcaaaatatgaatgcctgctttttaatgaaggaaatggggatcgccgtcattaacgactaatccccatccttgtatgaaaatcaaagttttctattgcagtaacatccaaaacctgctttatttagtagcagcaaactgaatataaaatttcaagctacctgttttaatgtgtcggaaaaaacaaagttaaacaggttttgtagatatacttttactgcattttactttttgccagaaatgctattaccgctgaagcttgttcatcagtgaaatactgcactgatgttattggctgatatgtataaggtataaactggaataactgtacagctgcaaactttttatcagcagaaagtatcacatccatacgtatattaccactagcctcactctttatattcgaacctgcagagaatgaacccgaattcacaagattcctcaaagcatccatgtgtttcaaatcaaagaatatactatgctctttagccacacttttggttggcaaataaataacttcttttgatttccagaagagacggaaaatccccataaggaataaacctgttcccagaaccatcaaagccatactaaccgtagaagacttatcttccaattcgaaagtagaagcaaaagctaaaataccgaccaataacattacagaagaaattaaaactcctgaaacacttgtacgttttgcgatatcggggtgtgaagatgcgaagatagtagcatcaatcgtttgagtagttgccataatatttaaagtttaaattattagtaaaaatataaagataaaaaggatatagtcaccggtattacagaagataccagtaaccacaaaataaacaataccaataaatatactactaaataattatacgcctcaaagtatatacatagtattcacttgatggctggcaataataggaagttgttgtaccataaatccgcccccagtgttgtgaaagtgaattatcacgatcagcacaacattgtagcgcattttttaaagaaaagaaatattctccaagttgtacacgttgaatacgtgttacagatatctgatggctttgcaagttgttcagttcagccactggcttaccaggaagatccggtgcgctgatttccccatgctgtctcattgcatatgtaatagcacgctcctgttcatccaccactttcgcagtagaaacattgcctgctatgctatgaaaagcaacagtcagcaacagaaacaatattacctttacaaattttgccatattcacctgcaaatataacagattctctctatgaaaagttctattaagatatattttaatgtatcttagtattagtaaacggcagacaaacaaaaaaggctacctgtgagggtagccttttttatatctataagaataactgtaaaattattcagctgattcagcttttggttcttcagccttaggagcttcagttgcaggagcttcaacagcagcaggagtagcttcagcagctttcttcgaacgacgagtacgagtagctttcttagcaactttttccttagccatgttttcattgtagtcaaccaactcgatgaagcacatttctgcattgtcacccaaacggttaccagtcttgataatacgagtataaccacccggacgatcagcaatcttaacagagatttctttgaacagctctgttactgcaatcttatcttgcaagttgctaaatacaacacgacgagagttcgtagtatcttctttagacttagtaatcaaaggctcaacaaactttttcaaagctttcgcctttgcaacagtcgtagtgattcttttgtgcttgatcaaagagcaagccatgttagataacatagcgcttctatgagaagcagtacgacctaaatgattgaattttttattatgtctcattttttattctttatctaatttatatttagaaatgtcggttccaaacgacagattcagactttccagcaaatcatcaagctcggtaagcgatttctttccgaagtttctgaattttagcaggtcagttttgttgaattgtaccaagtcgccgagagtttctacgtcagcagccttcaagcaattgagggcacgaactgacaagtccatatcaacgagtttagttttcaacagctgacgcatgtgcaatacttcttcatcaaactcttcattgccatcagtatcattactttcaagcgtgatcttctcgtcagagaacaacatgaagtgataaatcagaatttttgcagcttctttcagcgcttctttcggatgtatagaaccgtcggtactaatttcaagtactagcttttcgtagtcagtcttctgttctacacggaagttttctacagcatacttgacattacgtatcggtgtataaatagagtcgattggaattacattaacatccgtgcaatactcgcgattctcatcagcaggtacataaccacggcctttgttaattgtaatatcaatctgcatagttgacttagaatctaaatgacaaataactaattccggatttaacacttcaaatccagtcaaatacttacctatgtcacctgctttaaattcactggaattctcgacagtgatgctcactttttcgctctcgaactcttcaactacttgcttgaatctcacttgtttcagattcaagataatgttggtaacatcctcttttactccaggtacactagaaaattcatgctccacaccatcgattctgatagtagtgatagcaaaaccctctaatgaagaaagaaggattcggcgtaatgcattacctacagtaataccaaaacccggttccaacggacggaattcgaatttaccgaatctggagtccgcctccaacattaatactttatcaggtttttgaaatgctaatatcgccatgaaattaattattatttagaatacaattcaacgatcaaatgttctttaatgttctcaggaatgtctgctctttcaggtatgtgcaacattttaccaaccttagaagcttcgtcccattccaaccaagcatacttgctatgattgaaacctgcaagagaattagcaattacttccaaagatttagatctttcacgaacaccaatcaattgtcctggttttactgcaaatgaagggatgtttaccacttcaccatctacagtaatgtgcttgtgactaaccaactgacgagcagcagcacgtgtaggagcaattcccaaacggaatactacgttgtcaagacggccttccagcaattgaaggagtacctcaccggtaatacctttagcagtagctgctttttcaaacaaattgcggaattgtttttctaaaactccataggtgtatttagctttctgcttttcacgaagttgcacaccatattcagaagtttttctttttcttgaattaccatgttgtccgggaggatagttcttctttgacaaaactttgtcagctccaaagattccttcaccgaatttacgggcgattctcgattttggtccagtatatctagccatttcttttaaatatttaattgtttattcatgaacttaatttgttgcagccgcgattacagagagaaattaaatgtaatccaaaaacaaaatcaagatcattgtgtaagttaaaggtaaattaaactctacgtcttttcggaggacgacaaccattatgtggaagcggagtcacgtcaatgatttcagtaacttcgataccagcaccgtggatagttctaatagcagactcacgtccgttacctggacccttcacatatgcttttacctttctcaggccaagatcgaatgcaatctttgcacaatcctgggcagccatctgagctgcataaggagtattctttttagaacctctaaatcccattttaccagcagatgaccaagagataatctgcccttcactatttgcaagagaaacaataatattgttgaaagatgaatgaacatgcaactgtccattagcgtctactttcacatttctctttttagctgcaactgttttttttgccatatcaacaattattatttagtagcttttttcttattagcaacggttttctttctacccttacgagtacgtgcattgttcttagtgctctgacctctaacaggcagaccaatacggtgacgtacaccacgatagcaaccaatatccattaatcgcttaatgttcaattggatttcagaacgaagatcaccttctactttatactctgcaccgataatctcacgaatcttagcagcttgatcatctgtccagtctttaaccttcagatctttatctacaccagctttatctaaaatttttgctgaactactgcgacctattccatatacataggtcaacgcaatttcacctcttttgttctgaggtaaatctacaccaactattcttatagccatatactaaattattttttttgcaaaaataacaaattatccttgacgttgtttatacttaggatttttcttgttaataacatacaaacggccattacgtctaacgatcttacattctggcgtgcgtttctttaatgatgctcttactttcatatcttattttatttatatctaaacacaattcttcctttcgataagtcgtaaggagacatttcgactctcactttatctcccggcaggatcttgatgtaatgcatcctcatcttgcctgaaatatgtgcggtaatctcatgtccgttttctaattcaacacgaaacattgcatttgacaatgcttcaactataactccatcttgttctattgcagattgctttgccatattatattgctttatctcctaaaacttcttctatgaatttgaatgaagacaaaatatcagcttcaccagctccaacagctatcgtatgctcaaaatgtgcagcacatttacgatctctggtcctcacagtccatccgtcactttccattatcacttgtcggtctcccaatgttatcatcggctctatcgctatgcaaaggcctcttttcatcaatggtccatatcctcttttaccatagttaggaacctgaggatcttcgtgcatctctttaccgatgccatggccaacaaactcacgcactacaccataagaatgagactcacaatattgctgaatagcatatccgatatcaccaattcttttaccttgcactgcgttctggatgccaatatataacgcttctttagttatcttcaacaagttacgaatctcttcgtctacctctcctacacaaaaagtataagcagaatcaccacagaaaccattcatgtaagttccgcaatccactgatacgatatcaccatctttcagtacgatatcccctgggattccatgtaccacctgttcgttgacagaagtacaaagagatgcgggaaatggttctccatattgattcggaaatcctttgaaagttggagttgccccatgatctctaatgaactcttcagcaactttatccaactcacgtgtagttacaccaggcttcaccagtttggcaacctctgcaagagttttaccaacaagcaggttactctgacggagcaattctatttcatcttctgttttaagaaatatcatttctaatctaaagaattaatatgccgctacaccagcgcgtcctttaatacgaccagatttcaacagaccatcatagtgtctcatcaacaaatgactttcaacctgttgcagggtatcaagaacaacacctacaagaattaacaaagatgtaccgccgaagaattgagcgaatcctgcttgcactccgaatacaccggcaaaagcaggcataatagcaactaaagccaagaagaaagaacccggcaaagtgatacgagacattatatcatcaatatactctgctgttttctttcccggtttaataccagggatgaaaccattatttctcttcatatcctcagccatctgagtcggattaattgtaattgcagtatagaaatacgtaaataatataatcattaccgcaaagacaaaattataccagaaacttgtatgatctgtaaacgcatgcaagaaaccgcctgcatcatttacatttgaaaaaccgataaatgtaattggaataaacatgattgcctgagcaaagatgataggcataacaccggcagcattcacctttaaagggatatactgtctagcaccaccatattgcttgttaccaacgattctttttgcatactgtacaggaatctttcttgtaccttgcaccaaaagaatagcagcgccaatcactaataataagaatacgatttcaattataaacataatcagaccaccgctcttatttgctactctggacacaacttcttgcaacaaagcatcagggaaacgagcgataataccaatcaagatgataaatgaaataccgttaccaatacctttatcagtaattctttcaccaagccacaaaataaacatactacctgctgccaaaataatggtagaggtaaccataaacagagtccaatctaatgaagcatttaaggaagggccagcctgcattttaagattgagcaaataagaaggggcctgaactaacaatatagcaatcgtcaagtaacgagtatattgattcatttttcttctgccgctctcaccttcgcgttgcaacttctggaaatacggtacagcgattcccaataactggattacgatagatgcagagatataaggcatgattcctaatgcaaaaatagaggcattagaaaatgctcctccagagaacatatttaacaaggctaaaaggccttcacttgtttgttcgtgcaatttcgccagcatcgccggattgatacccggtaatacgacatacgatccgaaacggtaaattgccacgaacaatatggtgatgaggatccgctgtctcagatcctcaatcttccatatattctttaatgtttcaatagcttttctcattgaatcagagttttactacagttccaccagcagcttcgatagcagcagttgcagtcttagagaatgcatgagcttctacttccagcttgttagtcagagttccgttacccaatacttttaccaactgatttgaagaaataaatcctgcttcgataaagtcgtttacaccaacttttgtcaagctcttagcttcagcaagtttctggatagtatccagattgatagctttatattcaacacgattgatattcttgaaaccaaatttaggaactcgacgttgaagaggcatctgaccaccttcaaaaccgattttcttagagtatccagatcttgatttagctcctttatgacctcttgtagaagtaccacctaagccagaaccagcaccacgtccaattctttttcttgtcttagtagatccctcagcaggttttaaattacttaagttcatattgtaatttcgttttattattcaacaaataattacttaacaatggcaaccaagtgttttactttatctaccattccaagaattgaaggagtgctttcgtgttcaaccacacggttcagtttacgaagtcccagtgcgtcaagagttcttttctgatcagctggagcaccaattctacttttaacttgtttaatctttatagttgacatatctcctccttatcctctaaatactttttcaacactaatacctctgttctgagcaaccattcttgcatcacgcatttcactcaaagcttcaattgtagctttaacaaggttatgcggattcgaagaacctttagatttagccaaaacgtcagtaacaccaacactttccaatacagcacgcatagcaccaccagctacaacaccggttccgtgagatgcaggtttgatgaatacttcagcaccaccaaatctagctgattgttcatgaggaacagtaccttttaaaataggtactttcaccaggttctttttagctgactcaacacctttagcgatagcagctgttacttcacctgctttaccaagtccccaaccaatgataccttcttcgttacctacaacaacgattgcagagaaactaaaagttctaccacctttggtaactttagtaacacgattaatagcaactaatctatctttcagttctatatcgttagtaatcttaactctattattaactcctgccataatgattaaaatttaagtccaccgttacgagcagcatcagctacttcttttactctcccatgatacaagtaaccattacggtcgaaaacaacagtagttatacctgcttcctgagcctttttagcaatcatttcaccaactttagcagcttgttcttttttagcgactttctcagtcaaacctaaagaagaagcagcagccagtgtcttaccagaaagatcatcgataatctggacataaatttgcttgttacttctaaatacactcatacgcggacattcagtagtacctgaaattttgttgcgtactctatatttgatcttaactcgtctttctatttttgttgtcataataatctaattttatatgaattacttagcgccggctgatttaccagactttctacgaattacttcgccaacaaacttaatacctttacccttgtatggttcaggcttacggaaagaacgtattttagagcaaacttgaccaagcaattgtttgtcacacgattccaatataataagaggattcttatttctttcagacttcgtttcaacttttacctcagcaggtaattgaatgaaaatattgtgtgtataacctaaagccagctcaatgatgttaccttggtttgaagcacgataacctacacctacaagttccagttctttcttgtaaccttcagatacgcccacaaccatgttgtgaaccaatgaacgatacaaaccgtggaaagcatgtttctgcttcgggttatcaagcatttctttatcgttttctgttaaagttacgtgtccgtcttcaatagtaacattgatagcaggattcacatattggctcatttcgcctttgggtccctttacggtaaccacattatccttcagagtgattgtcactccagcagggatactaatgggtaattttcctattcttgacattctaattcctcctaattaatatacataacacaagacttcaccaccgattttcagttctgcagcctctttgttagtcattacacctttggaagtagatattatagcaatacccagcccattaataacacgcggcatatctttgtaaccagtatacttacgcatacccggagaagatattctttctaactttttgattgcgttaactttgttaacagaatcatacttcaaggcaaccttaatagttccttgaggaccatcttctacaaacttataattaaggatgtagcctttttcaaaaagaatcttagtgatttcttttttcaaattcgaagcgggaacttcaacaactctgtgctttgcaccaatcgcgttccgcaacctcgttaaataatctgctattggatcagtcatataaaaataaattaaattaatcaggactaccctgacaatatttaaacaataattaccagcttgctttttttacgcctgggatcagtccgttagatgccatctcacggaattgaattctcgaaattccgaactgacgaatataacctttaggacgaccagtcagtttgcaacggttgtgcatacgaattggattagaattctttggcaactcttgcaacttctgtgcagcttcgaaagcatcagcaggatcacctgttcttacgatttgcttcaaagcagctcttttctcggcgtatttggctactaatttagcacgctttacttcacgtgctttcattgattcctttgccatatctattagtcttttttagcgtttttaaaaggtaaaccgaattccttcagcaaagcataaccttcttcatctgtttccgcagaggttacaaaggtaatattcattccgagaattcttgtaatactatcgatatttatttcagggaaaatgatttgttcctgaataccaagggtatagttacctttaccatcaaacttactttcgatacctttgaagtcacgaatacgaggaagagctacacgaaccaatttttcaaggaattcgtacattctttcacgacgtaaagttaccataacaccaatcggcatttttttacgcaacttaaagtttgcgatatctttacgagaaatggtagctacagctttttgacctgtaatagctgtcatttcattgattgctacttcgataatcttcttatcagcaacagccatacctaatccctgattgattacaatcttcttaagtacgggtatctgcattgtagaagaatactggaactgtgatttcaatgcaggtgctatacgctctgcatattctttcttaagactagcagtattactcattacttaatctcctctcctgattttttagaataacgcactaaagttccttccgaactcttttttctcccaatacgcgttgctttaccagtttttggatcaaccgggttcaagtttgaaatgtggatagaagcttcttgcttcacaataccaccttgtggattctttgcattcggctttgtgcttttagataccatattgataccttcaacaaatgcacgtccttctttaacaagaaccttcaatacacgaccagttttgcccttatcttcaccagcatttacgtaaactgtgtcgccttttttaatatgtaatttactcattacttaaatcttttacaaattaaagtacctcaggcgcaagtgacacaactttcatgtttgtagcacgaagttctcttgctacaggaccgaaaatacgactacctctaatttcacctgcattattcaacaacacgcaagcattatcatcaaaacgtatataagaaccatcaggacgacggatttctttctttgtacgtacaatcaaagcctttgatactgcaccttttttaacatcactagaagggataacgctcttcactgaaactacaatgacatcccccactgaagcataacgacggcctgtaccacccaaaacgcggatacacaacgcctctttcgctccactgttatcacatactgtaagtctggattctacttgtatcataattacttagctctttcaattatttctactaatctccatcttttagtcttgctcaaaggacgagtttccatgatgcttacagtatcaccgatattgcattcattcttttcatcgtgagcatggtacttcttcgttttgctaacgaacttaccatatatagggtgtttttccttaaatttggcagcaactgtgatggtcttgtccatcttattgctcaacacaacccctgttctttcttttcttaaatttcttgcttccatcaagctgatcatttattgttaagttctctttcgcgcaattctgttttcatacgcgcaatagtcctgcgtaattgtttgatttgagcaggattttccaaaggagaaatagaatgattaataaccatttggttataattagctgtttccgcctctactctttctactaaatcattagtagtcatttctttaatttctgcaattttcataacacttacgcattttgattttgaatatcataatcacgtcttacgacaaacttcgttgtaataggaagcttttgagcagctaagcgcaatgcttctttcgcgatttcgtaagatactccttcagcttcaataatgattctacctggagttacaggagccacaaatccctctggagcacctttacctttacccatacgtacatcggcaggttttctagtgatcggtttatccgggaatatacggatccagatctgtccttgacgttgcatatatcttgttactgcaatacgagcagcttcgatctgacggcctgtaatccacttagtctccaaagcctttatgccaaaagaaccaaaggccagctggttgcctctctgggcattacctttctgacggcctttttgttgtcttctgaattttgtctttttcggttgtaacatagtttcctaaaattcaaattcgtttagcgattatttttctttcttttgaagttctttccgccgttgtttccactattgtttccacgaccactttctttgctttgtgtaaagttcggagccaattctttcttaccaaacacttcacctctacaaatccaaactttgataccaagaagacctactttagtcaatgcttctgcatgacagtagtcgatatcagctctgaaagtgtgcaacggagttcttccttctttatacatttcagaacgagccatttcagctccattcaaacgtcctgaaatctgaattttgataccttcagcacccatacgcattgtgtttgcgatagccatcttgatggcacggcgataggcaattttaccttcaacctggcgagcgatgttgttagcaacaatcacagcatccagttccggtctcttcacttcaaagatattgatttgaatatctttgtcggtaaccttcttcaactcctcttttaacttatcaacttcttggccacctttaccgataataatacccgggcgagcagtgcaaacagtaatagtaacgagcttcagcgtacgttcaattacgattcttgatacacttgcttttgcaagtcttgcattaagatatttacggattttgctatcttccagcaaagaatcaccgtaatcatttccaccataccagttagaatcccatcctctgataattcctaaacggttgcttattggattaactttttgtcccatctaccttaattttgatcttcgttattacttttagcaccaacgaacaatgttacgtgatttgaacgtttgcgaattctataacctctaccctgtggtgccggtctcattcttttgagtgtagctccaccatcaacaaaaatctgtgttacgaacaattcgccactttctgctttacgttcgtttttctgttcccagttagcaattgcagagcgaagcaatttttccactcttgcagcagcttcttttgaagaaaatttcaaaacaccaagtgctctgttcacttccataccacggatcatgtctgcaaccagacgcatcttacgtggagaagtaggaacattttgcaattttgcaaaatacatggtcttaagggcttcttttcttttttcagccgatattttttttcttgctcccattattatttattactttattatttcaaataaatcctgttatcttttcttgttaccagcgtgtcctctgaatgtacgggttggagcaaattcgcccaacttgtgtcctaccatattctcggtaacataaacaggaataaatttatttccattgtgaactgcaactgtatggcctacaaaatcaggcgaaatcattgaagctctggcccaagtctttactacgactttcttacctgattcattcatggcaagaattctcttttcaagcttaacgttaatatatggacctttttttaatgaacgactcatagtttactcaattaatcagattacttttttcttctctcaataatgtacttagacgattgtttcttaggagctctagtcttaagtcccttagcatacaatcccttacgtgatcttgggtgacctccggaagcacgtccttcaccaccacccatcgggtgatcaaccgggttcattacaacaccacggttacgaggacgacgtccttgccaacgagaacgtccagctttacctgaactttccaacccatgatcagagttacctacactaccgatagtagctttacaagtgctaagaatctgtctaacttcacctgaaggcaacttaattacacaatacttaccctcacgagaagtcaactgagcaaagttaccagctgaacgaaccagagcagcgccctgtcccggacgtaattcgatattgtgaattacagtacccaccggaatgttctgaagaggaagagcattaccaatctctggcgctgctgtttcacctgacatcagagtcgcaccaacttgcaatccattgggagcaataatatatcttttttctccatcagcataaaataacagagcgatacgagccgaacgattcgggtcgtattcgattgttttaactactgctggaacaccgtccttatttctcttgaaatcaacaattctaatcacctttctatgaccgccaccaatgtagcgcatagtcatcttaccttcgctgttacgaccaccagatgatttcttaccatatacaagagacttttctggtactgatgcagtaatttcttcgaaagtaccaataattttatgtctttgccccggtgttgtgggcttaaatttacgtactgccatttttattaaatattgctataaaaatcaatagtatctccttctttcaatgtcacgattgcttttttgaaagcattcgtacgaccattgatgatacctgctttggtataacggctcttattcttgccagcatacttcacagtattcacatcaactacagtaacattataaagagcttcaatttccttcttaatttccagtttgttagcttcaggacgtacaacaaagccgaaacgattcagcttatctgtgattgcagtcattttctctgttaccaacggtttaataataattcccattatttaagcctcctttttaaattaagatattgtcaatagccttcagagagttttctgtaagcacaacaaccccagcattcaatactctgtaagtatttaatcctgagatagtctgcacattagtaccctcaatgttacgagctgacaaatatacgtttttatttgcttccggtaaaattacaagtagctttttatcggaaactttaagattttttgtcattgcaacgaaatcttttgtcttaggagcttcaaatgtgaaatcctcaacgacaatgattgcatcattttgagctttataagacaaagctgacttacgagccaatgtcttaacttttttattcaatttgaagaaatagtctcttggtttcggaccgaaaacacgagcaccacctacaagaacaggcgagttcatatcaccacgacgtgctccaccgccacctttctgacgaccgatcttacgagttgaaccactgatttcacttctttcttttgacttatgagtaccctgacgctgattagccataaattgttttacgtccaaataaatagcgtggtcgttgggctcaattccgaagatagattcgtttaacgtaacctttctcccagtgtcttcacctttaatgttatatacgttaacttccattatttctcaattaatacgattgaacctttgcaacccgggatagaacctttaaccaaaagaaggttatgatccgcgattacttttaatacctgcaagttttgtacagtgactctgtcaccaccaagttgtccacccatgcgcattcctttgaatacttttgcagggtaagaacaagcaccgatagaacccggtttacgagcgcgattatgctgaccgtgagtagcttgacccacaccaccaaaaccatgtctttttactacaccctgaaaacccttacccttagaagtaccaacaacgtcaacaaagctagcgtcgttaaacatttctacagtaatggtatcacccaaattcaactctgtttcaaattctttgaactcagccaagtgtctcttcggtgttactcctgctcttttaaaatgtcccatcaacggtttagttgtatgtttttcctttttgtcctggaaacccaactgaacagctgcatagccatctttttctacagttttaacttgagtaacaacacaaggacctgcttcgataacagtgcatggtacatttttaccatcggcactgaaaacggatgtcattccgattttttttcctaataatcctggcatttcactaatttttaattatcaaactttaatttctacttccacaccacttggcaattccaacttcatcaaagcatctactgtcttagctgttgagctatagatgtcgattaatctcttataagaagagagttcaaattgctcacgagactttttgtttacgaaagtcgaacggttcacagtaaagatacgtttgtgcgtaggcagaggtattggaccgctaacgatagcaccagtagcttttacagttcttacaattttctcagctgacttgtcaaccaagttgtggtcgtaagatttcaatttaattctaattttctgactcattattttttttaattaatacatttataataagataaagcggcaggctaagagtcattcgctagcctgctgctttagatattttagagtaaatcagcgcgtccttttacttcttccaatacagccttagcaatagaagaagaaagctgagcgtgatgagagtaggtcattgacgaggttgcacgaccagaagtaatagtacgtaaagctgttacgtaaccaaacatttccgccagtggaaccatcgctttcacgatacgagcgccagagcggctagattccataccttcaacctgtccacgacgtttgttcaagtcaccgataacatcacccatgttttcttccggagttacaacttccagtttcatgataggttccatcaaaacaggacctgccttagcacatgcatttttataagcctgcattgcacagatttcaaatgacaactggtcagagtcaaccgggtggaatgaaccatcaaccaaagtcactttcaatgaatccaatgggtagcctgccaaaacaccactcttcatagcatttgtaaagcctttctgaactgcaggaataaattccttaggaatattaccacccttcacttcatcaacaaactgcaaaccacctaaagtgaaatccgcatcagccggaccaatgttcacaatgatatcagcaaacttaccacgtccaccagactgcttcttgtacacttcacgcaagttaactgtcttcgtgatagcttccttatagttaacctgaggcttaccttggttacattctaccttgaattcacgtttcaaacggtcaatgataatatccaagtgaagctcacccataccagaaataactgtctgacctgtctgttcgtctgttttcacagtaaatgtcggatcttcttcagccaatttagccaaaccgttagacagtttatccatatctttctgagtcttaggttctacagcgataccaataaccggttccgggaagtccatagactcaagtactatcggagctgtttcatcacacaaagtatccccagtacgaatatctttaaagcctacacctgcaccaatatcaccagcaccgattacttcaaccgggttctgtttgttggagtgcatctgaaacagacgagaaacgcgttctttcttaccagaacgagagttgtagatataagaacctgcttcaattttaccagaataaacacggaagaaagtcaaacgtccaacatatgggtcagttgcgatcttaaacgccaaagcagatgttttttcatcatcacttggtttacgatcctcttcagctcccgtattaggatttgtacctattacgttctctgtatcaagtggagaaggcaagaaagcacaaacataatcaagcaatgtctgaacacctttgttcttaaaagaagatccgcaaagcataggaactacagccatctgaactgttgcattacgaagagctctcaatacttcttcttcagtaatagtagaaggatcatcgaaatatttctccatcaaagcatcatcaaattctgctactttttcaagcatcttatctctccactcgttagcttcatcgataagttctgcagggatttcctcaatactgtagtcagcccccattgtttcatcatgccaatagatagctttcattttgataaggtcaacaagacctttgaaagattcttcagcaccgataggaacaacaatcggacacggattagctccaagaacatccttcatctgacgaactacttcaaagaagtcagcaccagaacgatccatcttattaacataagcaatacgaggaacgttatatttatcagcctgacgccatacagtttctgattgaggctcaacaccaccaacagcacagtaagcagctacagccccatcaaggatacgcaatgaacgttctacctctgcggtaaagtcaacgtgtcccggagtgtcaatcaagttaattttataagtatcaccagcatatttccaccttgttgttgtagcagcggatgtaatagtgataccacgttcttgctcctgttccatccagtccatagtagcagcaccatcatgaacttcaccaattttgtgagtcaatccagtatagaacaggatacgttcagaagtagttgtttttccggcatcaatgtgagccatgataccgatattacgagttaaatgtaaatcatgtttagccatcttctaattcctttactttaagtttatattaggtttcttacagtattagaatctaaaatgagcaaatgcacggttagcttctgccattctgtgcatatcttctttacgtttgtatgcaccgccttgttcattgaaggcatccataatttcagcagccaacttgtcagccattgatttaccacctcttttgcgagcaaacagaatcaaattcttcatagagattgattctttacgatccggacggatttcagtaggaacttggaaagtagcaccacctacacggcgagactttacttccacttgcggagttacattatccaaagcctttttccagatttcgagagctgatttttcttcgttaggaagttttgctttcacagtttccaaagcggcataaaagatttcataagatgtatttttctttccatcatacatcaagtggttcacgaacttggaaaccttttggtcattaaacacgggatccggaagaatcaggcgtttttttggttttgcttttctcatttgtttgaaaaataatgtttttgttcttggttgtctacttcttgacttcttcaactctccctccggagaatttactcaacctttagcatttccaacaaactaaaacgtaagttattactttaattttaattaggtcttaatccttattttttcttacccttagcaggagcagcagcttgtcctggtttcggacgcttagcaccatatttagaacgtctttgagtacgaccagcaacacctgctgtatcaagtgtaccacgtacaatgtgataacgcacacccggaaggtcttttacacgaccaccacgtaccaaaacgattgagtgttcctgcaagttgtgtccttctcccggaatgtatgagttcacctctttttggttagtcaaacgtacacgagctactttacgcattgcagagttcggcttcttcggagtagtagtgtatactctcacgcaaacgccacgtctttgaggacatgaatccaaggctggagatttacttttctccaccagcacttcgcgtccttttcttactaattgctgaattgtaggcattttaattgttttttgatttatattattgttatattaatttcgtaactatacattttgggctgcaaaaatacgaataatatttgaatattcaatgcactacaacttttttttcttttttaatgtttttatatcatcctcacgcttcgccttttacacccgtcaaaggagaaatagggggttcatccgaagtacgaatcggaccgaatacgcgctcatactttgctatattatcttctaatgcccgcagcagacgttttgcgtgctccggagccacaataatacgagattgcacaccagccttcggtatacccggcattacgcgcacgaagtcaaggatgaattcagaactcgaatgagtaataatagcaagatttgcataagttccctgtgcaacctcttctctcaattcaatctgtaattgtccgttgttattttgttcttccatatttaatatgattaaaaagttatcctgcaaaataacacatttttcctgaaactaatggtaatacacgcgagtaaaaaagaaataaaaaaaggagcaattgcccaatcaggcaactgctccttttcatatagtcaattgaattgtatttattctacttcattgtagtcaagtactgttttcttgttagccaagatacggtcatactcttcttttgatccaacgatgagcttttcgaactcgcgctgtccggtaccggcaggaatcaagtgaccacagatcacattttccttcataccttcaagcttatcgatcttaccgttgatagcagcttcattcaatactttcgttgtttcctggaaggaagcagccgacataaagcttgatgtttgcaaagcagcacgcgtgataccttgaaggatctgagtagaggtagcagcaacagcgtcacgaacttcaaccggcttcaagtcacgacgtttcaacatactattctcatcacgcaacttgcgggcagttacaatctgtccagcttgcatattttgagaatcaccagcatccactacgactttcttgccccagatacgatcattttcttccatgaattccagtttgtctacgacttgctgttcgaggaagcgagtatctcccggttcatcaatttgtactttacgcatcatctgacgaacgataatctcaaagtgcttatcattgatcttcacaccctgcaagcggtatacatcctgaacttcattcacgatatattcctgtacagctgtaggacccttaattgccaagatatctgccggagtagtagcaccgtcagacaacggagtaccagcacgtacatagtcattttcctgtaccagaatctgcttagacagtgcaaccagatacttcttaacctcacccgtcttggaagttacgatgatttcacggttaccacgtttgatcttacccattgtcacctcaccgtcgatttcagaaacgacagccggatttgacgggttacgagcttcaaacaattcagtaacacgaggaagaccacccgtgatatcacccgccttacctacggcacgcggaatcttcacgattacttcaccggcttttaccttctgaccattctcgatgataacgtgcccacctaccggtaagttataagtacggatcaaatcaccgtcctctgttaagatatgagcggtaggaactttggttttatccttggattcaataataataatttcacgaagacctgttgcttcatccgattcaaccttataagtaacgttttcaatcacgccctcaaattcgatcttaccggttgcttctgtgataataacagcattgaacgggtcccacttagcaatcagtttgcctttttctaccaagtcgccgtcgcttacatacagtgttgaaccataaggtacgttatgagtagaaagaacgataccggtattcacatccacaaaacgtacttcggccaaacgacctactaccacttttgcagattcacccatctcgtcaacgatatctactgtacgcaactcttcaaattcaagacgtgcattatttttagcaacgatactggcgttagctgcaatatttgcagcagtaccaccggcgtggaatgtacgcaatgtcaactgtgtacccggctcaccaatagactgagcagcgattacaccgacagcttcacccttctgaaccatgcggctcgttgccaggttacgtccgtaacatttagcacaaacacccttcttagcttcacaagtcaataccgaacggatttcaacactctcgatcggagactcctgaatcttcttggctacttcttctgtgatttcttcaccaccagcaacaagcaattcacctgtggtaggatgaataatatcatgtacggaaacacggcctaagatacgttcgtacagagtagcaataacttcatcattattcttaaggtccgtacaaaccaatccgcggagtgtaccgcaatcttcttctgtaataatcacatcgtgtgatacgtccaccagacgacgagtcaaataaccagcatcggcagtcttcaaagcggtatccgccaaacctttacgagcaccgtgggtagagataaagtactccaacaccgaaagtccttctttaaagttcgacaaaatcgggttctcgatgatctgaccaccttcagcgcctgctttctgcggttttgccatcaaaccacgcatacctgacaactgacgaatctgctctttagaaccacgggcaccagagtcaagcatcatatatacagagttgaaaccctgatcgtccgaagaaatagtcttcatcaggatattagacaactcggagttcacatgtgtccaaatatcaattacctgattgtaacgttcgttattggtaatgaaacccatgttatagttgtttacgacttgttcaacttcgtcgtaacctttctgtaccaaagtttctttttccttcggaatgataatatcacccaagttgaatgacaaaccacccttgaacgccatctgataacctaaattcttgattccatccaggaagtcggcagccttagccacaccacataccttaattacatcactaataatatcacgaagagatttcttagagataattgtattgatataaccagcttcaggtggaacgatttcattcacaatcacacgtcctactgaagtttcgcgcattacgtctacaatgttaccattttcatcaacgtctttcacgataacctttaccggagcatgaatatctaccttaccttcattgtaagcgatcaacgcttcttccggtccgtagaatgtcaaaccttcaccttttgcaccggcacgcaacttagtaatatagtacaaaccaagaaccatatcctgtgcaggcacagtaataggcgcaccgtttgccggattcaatatattatgtgattgaagcatcaacatttgtgcttcaagaattgcttcattactcaaaggcaagtgaacagccatctggtcaccgtcaaagtcggcgttgaatgccgtacatgccaacgggtgcaactgaatagctttaccttcgatcattttaggctggaaagcctgaatacccaaacggtgcaaggtcggagcacggttcaacagtaccgggtgtcccttcattacatgttctaagatatcccaaatcaccggctctttgcggtctacgattttctttgcagacttaacagtcttaacgataccacgttcgatgagcttgcgaataataaacggcttgtataattcggcagccatcaatttaggaataccgcattcacccatctttaattccggaccaacgacgattacggaacgagcagagtagtcaacacgtttacccagcaagttttgacggaagcgtccctgtttacctttcaaactgtcagacaatgacttcaacggacggttggcgtctgtcttcacagcacttgacttacgtgagttatcaaacaaagaatcgacagattcctgaagcatacgtttttcattacgcaagattacttccggagccttgatttcaatcagtcgtttcaaacggttgttacggataatcacacgacgataaaggtcgttcaagtcagatgtagcaaaacggccaccatccagcggaaccaacggacgaagttcgggcggaataaccggtacgatacgtacgatcatccattccggtttgttacgtccacgtgatgcgcggaacgattctactacctgaagacgtttcaaagcttcattcttacgttgctgagacgcatcgtttccggcgcggtgacgcagttcgtaagacaaagcatccagatccaaacgagccagcaaatcataaatagcttcggctcccatctttgcaacaaatttattcggatcattatcttcaagatactgattgtctttcggaagcgtatccaaaatatccagatattcttcttcagaaagcaaatcatattcagctacgccatcttcagctttcacacccggctgaataacaacataacgttcgtagtatataatcgaatccagtttctttgtcggcaatccgagcaaataaccgattttattaggaagcgaacggaaataccagatgtgagccaccggcacaaccagctggatatgtcccatacgttcacggcgcactttcttttcagtaacttccacaccacaacggtcgcagacgatacctttataacggatacgcttgtatttaccgcaatgacattcataatccttgataggaccaaaaatgcgctcgcagaacaaaccgtcacgttcgggtttgtacgtacggtaattaatggtttcaggcttcaaaacttcaccactcgaattctcaaggatttcttccggagaagccagaccaattgagatcttcgagaaattacttttcgtcttattttcttttctaaaagccatactctatataattgagatttgataattgaatcattggaaattgaaaaaagtgcggatgccaacagaccttcatcggtacattgacatctcacattctttcattattttattctaggttgatactcaaacctaaacctctcaactcgtgcaacaatacgttcaaggattccggaataccaggttgtggcatcggttcacctttcacaattgcttcataagccttcgaacgtcctaccacgtcatcagatttgatagtcaggatttcctgcaagatatgggcagcaccgaaaccttcgagtgcccaaacctccatttctccgaaacgctgaccaccgaattgagctttaccaccaagaggttgctgagtaatcaatgagtacggaccgatagaacgagcatgcatcttgtcttcaaccatgtggcccaacttcaacatgtaagttacgcccacagtagctgcctggtcaaattgctcacctgtaccaccatcacaaagataagtcttacagtagcgaggcaatcctgccttgtctgtccactgatccagatcttccatggtagcaccgtcgaaaataggagtcgcaaatttcacgcccaacgtttttccggcacgtccgagtacagcttcaaaaatctgaccaatgttcatacgagaaggcacacccaatggattcaacacgatgtcaaccggagtaccatcagccaagaacggcatatcttcctgacgaacaacacgggatacaatacccttgttaccgtggcgaccagccatcttatcacccacaccaatcttacgtttcttagcaatatatacttttgccatctggataataccagcaggaagttcatcaccaattgtaatagcaaacttcttacgtttcaattcagcatccagctctttatatttcttaatgaaattcatcaccagatcacgaatcataccgttaatatgatcgtcgcttgtccagttgctcaattgaatagaagtaaagtcaagtgaatcaaaatcagaagcactgaacttagaacctttcgcaataacttccgcacccaaatagtctttcacaccttgagaaaccttaccttcagtcaaagtcatcagtttcttaaccaggatacgtttcaagtcagctaccttagattcaaattcatcatcaatcttaggcaacaatgctttatcggccagtttagagctacgattcttaatcacacgtgagaaaagtttcttatcaatcaccacacctttcaaagaaggagaagctttcaaagaagcatctttcacgtcacctgccttatcaccgaagatagcccgaagcagtttttcttccggagaaggatcagattcacccttcggcgtaatcttaccaatcatgatatcacccggctcgatacgagcaccgattcttacgataccgttttcatccaagtctttggtagcttcttcacttacattcgggatatcagaagtcaactcttccataccacgttttgtctcacgaacttccagagaatattcctctacgtgaactgaagtcaacaagtcttcgcgtaccacacgttcgttcaatacgatagcatcctcatagttgtaacccttccaaggcatataagctaccaacaggttcttacccaatgccaattcacccttttcagtagaataaccttcagtcaagatatcacctttcttcacacgctggcctttgtcacaaatcggacgtaagtcaatcgtcatgttctggttagtcttacggaacttaggtattctatattccttcaaagcaggttcgaaacttacaaattcttcgtcttccgtacggtcatacaaaatacggatagtagtagcatccacatagtcaaccacaccatcgccttctgcagtaatctgggtacgagagtctcttaccaactgacgttcgatacctgtacctacgattggagcttcacttctcaacaaaggaaccgcttggcgcatcatgttcgatcccatcaatgcacggttagcatcgtcatgttccaagaatggaatcaaagaagctgcaatagatgcaatctgctgaggagcaacgtccatcaagtcaacttcagatggttcaacaaccgggaaatctgcatcttgacgagacttcaccctgttaagtacgaatgtaccatcgtcattcaacggagcatttccctgcgcaataaccttttcttcctcttcttcagcagtcagataaatcagaccgttatcagaaagatccactttcccattttccaccttgcggtagggagtttcaatgaatcctagctcattaatcttagcaaatacacacaatgaagaaatcaaaccgatgttcggaccttcaggagtctcaatcggacaaagacgaccatagtgtgtatagtgaacgtcacgaacctcaaatccggcacgttcacgggaaagaccaccaggaccaagggcagacatacgacgtttgtgcgtaatttcagccagcgggtttgtctggtccatgaactgcgacaacgcgttcgttccgaagaatgagttgattactgaagaaatagtcttcgcattaatcaaatcaatcggagtaaacacttcattgtcacgaacgttcatacgttcacgaatcgtacgagacatacgagccagccccacagcaaactgattagaaagctgttcaccaacagtacgtacacgacggttactcaagtggtcaatatcatccacatccgcttttgagttaatcaactcaatcagatatttgatgatttcaataatatcttccttcgtgaggacacgcacgtccatatcagtcgtcagattcaactttttgttgattctgtaacggcctacatcaccaaggtcatatcgtttttctgagaagaacaagttattgataacctcccttgcacttgcgtcatcagccggatcggcattacgcaactgacggtagatatacaacacagcttctttttccgagttactcgggtccttctgcaacgtattatatatgatagagaaatcggactgattcggttcatccttatgcaaaaggatgttctgaactcccgactccaaaatttcatcaatatgctcctcttccagtacggtttcacggtcgataataacttcgttacgttcaatagaaaccacttcaccggtatcttcatcaacgaaatcttcaatccatgttttcaagacacgtgcagccagtttacggcctaacaccttcttcagatttgtcttgtttaccttcacatcttctgcaagatcgaaaatctcaagaatatctttgtcattctcgaagccaattgcacgcaacaatgtagtcaccggcaatttcttcttacggtcgatatatgcgtacatcacattattgatgtcagtagcaaactcaatccacgaacccttaaacggaataatacgagccgaataaagtttcgtaccattggcatgtacactctgaccgaagaacacacccggagaacggtgaagctgtgacacaactacgcgttcggcaccgttaatgacgaaagtagccttatcagtcatataaggaatcgggccgaggaatacgtcctgaatcactgtatcaaaatcctcatgatcggggtccgtacagtaaagcttaagtttcgcttttaagggaacactataagtaagcccacgctctatacaatcatcaatggtataacgcggcggatcaatataatagtccagaaactcaagaacaaaattgtttcttgtatcggcaatagggaagttttcagcaaatactttatacaatccctcattcttacgcttttcaggtggggtatctaattgtagaaagtcttggaatgacttcaattgtacttccaggaaatccgggtattctagcggattcttagtcgaagcaaaattaactctttgatttacagtatttgaagacatctgtcaatgaatttggagaacttaatttgaaatatatacacaaaaaggttaagaatcctcttgtgaaggattcctaaccgaattacctgattaccaggccaatgttatttaagttcaacttcagctccagcttcttccaatgttttcttcaatgattctgcttcgtctttagccaaaccttcttttactgtgctaggagcaccgtctaccaagtctttagcttctttcaaaccaagaccacaagcttccttaacggccttaactacttgaagtttagctgcaccagcgctcttcaatactacgtcgaaagaagttttttcttctgcggcagcagcaccagctgcaggaccagcagcaacagctacagctgcagcagcaggttcaataccgtattcttctttaaggatagttgcaagttcattaacttcttttactgtcaagttaactaattgttctgcaaaagctttcaaatctgccattttttgtatgattttaattgtttaaatactttgttgatttttgaaaattattcgggacgttcaccaagagtcttgagaactccgtgaagggtgttaccacctgattgaagagcagaaataacattcttggccggagattgcaacagggcaacgatatcggcgataacttcattcttactcttgattgaaacgagagcatccaattgatcagcaccaatgtagaagctttcttctgcatatgcagctttcagtccgggaataccgtctttcgctttgtctttgattaacttagcaggaacgtttgcagtattgctaaacataacagcagtagtacctttcaaagaaccgtaaagaggtgagaagtcttcttccaagctttcaagtgctttgtgaagcagcgtgtttttaaccaacatcaatttgatgtctgatttaaaacaatctcttctcaatgcactggtagcagcagcgttcatagctgtaacgtctaccaagtagaagtgaccatattcctttactgtagcagcaatttgctctataatcgtacttttatcttcctttctcattatttctctgttttattagatttcatccactgatttcgggtcgattttaatacccgcactcattgtactagaaagataaatactcttaatatatgtaccctttgctgcggtcggtttcagtttgttcagagtagagatgaactctttcgcgttgtcgcgaatctgatcaggactgaatgataccttaccgatagaagtgtgaacgataccgctcttatcaactttaaagtcaatcttaccttgttttacttcttttacagccttagcaacatccatagttacagtaccactcttagggttcggcatcaatccacgaggaccgagaacacgaccgagcgcaccaattttacccatgatagatggcatagtgatgattacatcaatatcagtccatccacctttgatcttttcaatatattcgtcaagaccaacgtagtcagcaccagcttcttttgcagcagcttcagcatccggtgtacaaagtaccaatacacgtacttctttaccagtaccatgaggaagtgaaacaacacctctcaccatctggttagctttacgtggatcaacacctaaacgtacatcaatatccagtgaagcatcaaacttagtaaaagtgatttcttttaccaaagatgcagcttctttcagtgagtatgctttccctgcttcaatcttttctgcagctaacttttgattttttgtcagtttacccattacaattgaagtttattaattattaaccgggaactccccttttacagcgatacccatacttctagctgtacctgcaaccattctcatggcagcttccacagtaaaacagtttaagtcaaccattttgtcctgagcaatcgtacgaacctgttcccaagtaagctcggcaactttcttacggttaggctcagcagaaccactctttaccttagctacttcaagtaattgaatagcaacgggaggagtcttgattacaaaatcgaaagacttatctgcgtagtaagtaatgataacaggtaaaatcttacctgctttgtcttgggttctggcattgaattgcttgcaaaattccatgatattgatacccttagaacccaaagcaggtccaacgggaggtgatggatttgcagcgcctcctttaatctgtaacttgattagtccagcaacttctttagccatttttttattgatttatatataaacattaaacgaagaacaacaacagcgtaacaattccgcgttattccttttccacttgcataaagcccaattcaagcggcgttttgcgcccgaatatcttcaccatgacctttagtttctttttttcactattcacttcttcaatgataccactgaatccgctgaaaggtccaaaagtaacttttacagtttctcccactacgtacggaatattgagttcttcacccgtttcctgcagttcgtccactgtaccaagtatacgattcacttctgattgtctgagaggcaccggtttttcggagccgcctaaaaagcctatcacattcggagtattgcgcaggtgatgagcgacctcaccaaccaaagcagcctccactaaaacgtagccaggaagataacttctttccttcacaatttttttaccattgcgaacctggtaaactttttcagtaggaatcaatacctgagatacatattcaccaaggtcgctgttcttaagatcagcttcaagatattcctttaccttagcttctttaccgctaatagcacgtagaacgtaccatttcttttcaatctcagccattttcaattcctaattttttaatgtggataaacgattttttccatgaagttctggaaacagacatccataccccatactaccaatgcaataagcagggaagcatataaaacaactactgcactgttagcaagttcagaatacgtaggccacgatactttatgtacaagttcgtcgtaagattctttaatataagctattacctttttcatttcaataatattagcacgggaggagaggctcgaactcccgacacccggttttggagaccggtgctctaccaactgagctactcccgtgtgtacataatcagttcccgatggaaaaccgggaactgattaattattgtgtattagtcgataatttcagtaatctgaccagcacctaccgtacgtccaccttcgcggatagcgaaacgaagacccgggttcaatgctactgggtagatcaactcaactgtaatagttacgttatcacccggcattaccatttctgttccttccggcaaagtgatttcacctgtacagtccatagtacgcaagtagaactgaggacggtatttgttgtggaacggagtgtgacgaccaccttcttctttcttcaagatataaacctcagctttgaatttagagtgcggtttaatctgacctggtttacaaagaaccataccacgtttgatttcgttcttgtcaataccacgaagcaaaagacctacgttgtcaccagcttcaccttgatccaacagtttacggaacatttcaacaccagttacaactgatttcttatcttcacctaaaccaaggatttcgatttcatcaccaacgtggataacaccagtttcgatacgacctgttgctacagtaccacgacctgtgatagagaacacgtcttcaaccggcatcaagaatggtttatcaacatcgcgcggaggcagtggaatccagttatcaactgcatccatcagttccataactttgtcttcccatttttcaacaccgttcaatgcgccaagagcagaaccacggatgataggagtattgtcaccatcgaaatcatagaatgaaagaagttctctcatttccatttcaacgagttccaacatttcttcgtcgtctaccatatcgcacttgttcaagaatacaaccagacgaggtacgtttacctgacgagccaacaggatgtgttcgcgagtttgaggcatcggaccatcagttgcagcacaaacgatgatagcaccgtccatctgagcagcaccagttaccatgttctttacgtagtcggcgtgacccggacagtctacgtgtgcatagtgacggttagctgtttgatattcaacgtgagaagtattgatagtaatacctctttctttttcttcaggagcgttgtcgatagaatcgaaagaacgcaattctgaaagacctttctttgccaacacagtagtgatagcagctgtcaacgttgtcttaccgtggtctacgtgaccgattgtaccaatgtttacgtgcggtttggtacgttcaaatttctctttagccatagctttacttgttatttatttgattaataatcagcatttacatcctttatgagctgttaccgggatttgaacccgggacctcttccttaccaaggaagtgctctaccactgagctataacagcaagaaaagagagcggaagacggggctcaaacccgcgaccctcagcttggaaggctaatgctctatcaactgagctacttccgcattcttgccaaagttgtcactctgattgtgggcaaagatggattcgaaccaccgaaggcgtaagccagcagatttacagtctgccccatttggccactctggtatttgcccttttcaaaatcaagaaataaaagaactattttcaaacaatataataaagacagatgttctatctttgttcttcggtttctttttgagcctcttgtcggattcgaaccaacgaccccgagattacaaatcacgtgctctggccaactgagctaaagaggcaaacttactaaaaaatgcaaccgtcacgttctaacgcgagcgaaacggctgcaaatttagttatttatttctttcccgcaaaatatttgggatttttttatttgctacgttgcttttccttgtatttaaccagctgttttccgagtgcttccacatctaaatcaattgcttcttcaaatgtatcgcatactttgcttgcataaaactctccatttggaatcaatattttaatgcccgcttccttgttttcagcaacttctggtttaactacctttaatgacacctctactttctttatatcttcgtaatatttttccaacttggacactttcttctgaataaatgcctgcaattgctctgacgcatcaaagtgaattgattgaattctaacatccatacttacctccttttttttaagctcttggatgagcttgtttatacacttttttaagttcttcaaatgtggcatgtgtgtagatctcggtagttgttatgctctcgtgacccaaaagttcttttaccgcccccagttctgcttcattgttcagcattgtggtagcaaaagtatgcctcaacacgtgaggactctttttcttcaacgtcaccacctttgacaggttccgtttcactaaattatagactagattcttgtaaagccgttcaccattctctctaataaagaaagcttccgacctttccggaatcgtttcgtttcttacattaatatattcaagcatcagctcctgcagttcgtcaccgaacggaatcagccgttgcttatttcttttcccggtcactttcagaagagaagccgaaaaatccacatccttatcatccaaacctattaattccgaaagtctcatgccagtagcataaaacacttcaatcaccaaccggtcccgacaacctttaaatccttggccaaaatccgtatcatccaataacctattcatttcgttctcttttaagaacacaggcaacggctttttgtttttaggtccttttattttacgcaaaggatctatagtcgtttctccctgtcttatgagatacttgtaaaacgttcggagcgaacttagcttacgatttacagaagttgaggtataccctttatccatcaatgaaacaatccattcacgaatcagttccgcctcgacctctaacggatcaaacttcccatactcttcctgagcaaactcctgcagttgctttatatcttcaccgtacgcaagaacggtcttttcagaatagttccgctcatactggagataatcaagaaaagattctatcaacataatatcgctacatctaaaatcgtgcaacgaatgtatgaaaagaattcaataattcaaaggaaattacgaattattaatcttctacttgctgaagttgttgtacgtaaactgcgcgttctttcttaagtctcttagttacagacggtttatcaaactgctgtctgcttctcaattcttttacgatgccagttttctcaaattttcttttgaacttcttcagcgctttttcaatgttttcgccttcttttacaggtactacaatcattttgttattattaatatgttatgattaaaaaaattccgcagtcaaattgcgccgcaaaattacacatactttctttattcacaaaactttcggcaaatatttctcaaaaactattcataaacaagtcattaaatgcggaaagttagtacctttgaaacacttacatgtctataataatataataaggtatgaaacagaacataaaagaacgaatacatgctctgcgcatgacattccatcccaattacatcaaagcattcattatccccagcaccgaccctcatcttagtgagtatgtggctccccactggatgtcacgcgaatggatttccggttttacgggttctgcaggaacagcggtcatcctgatggacaaagcgggattatggaccgactcacgttacttccttcaggcagcgaaagaactggaagggagtggcatcacactctacaaagagatgctgccggaaactccaagcataacagagtttctctgccagcacttaaaacccggagaatctgtaagcattgacgggaaaatgttctccgtgcaacaggtagaacaaatgaaagaagaactagcggcacatcagttacaggtagatatatttggagatccattaaaaaacatctggaaagaccgtccctccatacctgactctccagccttaatttatgatatcaaatatgcaggaaaaagctgcaaagaaaaaatatccgccatccgtgcggagttgaagaagaaaggtgtctatgccttattcatatctgcactggacgaaatagcatggactctcaatctacgaggaaacgatgtacattgcaatccagtcatagtgagctacctgttaattacacaggatgaggtgacttacttcatttctccggaaaaagtgacgccggaggtcgagacttatctgaagaaacaacaaataggaatacagaaatatgatgaggtagagacattcctgaattctttccccggagaaaatattcttattgatccacggaaaacgaattatgcgatttactcggccatcaatccgaaatgttccattattcgtggcgagtctcccgtcacattattgaaagccattcgcaataaacaggaaatagccggcatccatgctgccatgcaacgagatggagtggcacttgtcagattcctcaagtggctggaagaatctgtatccaccggaaaagaaactgaattaagtatagataaaaagctgcatgaattcagagcagcacagcccctctacatgggagaaagtttcgacaccattgcaggatataaagagcacggagcaatcgtgcattattcggcaacgccggaaagcgatgtaactcttcagcctaaaggattcctactcttagattcaggggcacaatacttggacggaaccactgacatcactcgtaccatcgcattaggcgaactgacggaagaggaaaagacggattataccttaatattaaagggacacatagcattggctatggctaaattcccagccggaacccgtggtgcgcaactcgatgtactggcgcgtatccctatctggaatcacagaatgaactttctccatggcacagggcacggcgtcgggcatttcttgagtgtacacgaaggaccacaaagcattcgtatgaatgaaaaccctgtaattctccagcccggtatggttacatccaacgaacctggtgtttataagacaggcagtcacgggatacgtacggagaacttgacgttagtttgcaaagatggagagggaatgtttggagaatatcttaagtttgagactatcactttatgccccatctgcaaaaaagggatcatcaaggagatgctgacaaatgaagaaattgaatggttaaacaattaccatcagactgtctacgagaaactatcaccggatcttaacgaagaagaaaaagtttggttacaagaggcgactgcttccctttaaaaagaacttgcctgacacccgggtgtcaagcataccaacacccgggtgtcagactgctcaagacccgggtctcatacatcacgacacccgggtgtcgtacaacatagaactgcattaaataaaaaactttattagaaacaaatattatatggctttaattaaatcagtacggggttttactcccgaaatcggagaaaactgcttcctcgcagataatgcaactattataggagatgtaaaaataggaaatgattgtagcatttggtttaatacggtattaagaggtgacgtcaactccatacgaatcggcaacggtgtcaatattcaagatggaagtgtcttgcatacattataccagaaatcgactattgaaattggcgatcacgtatccgtaggacataatgtcaccattcatggggcgaccatcaaagattacgcattggtcgggatggggtcaaccgtactggatcacgttgtagtcggtgaaggagcaatcgttgccgccggctctctggtattaagcaataccatcattgaaccgggaagcatttggggaggagtacccgcgaaattcattaaaaaggtagatcctgaacaagccaaagaactgaatcaaaaaattgctcacaactatctgatgtactcacaatggtataaagaatagctttaaataaaacctaaaacaaaacttcgttcctccttactcttatatttttaagaaaagggggaacgttttttttcagaacaccattgacacttcaatagccacataaataagccatttacaaacacataccataagatccacactactaagactaatcatcattgatttccaaagtccatatttatattatttaaccctctgaatatatttttattacgaattattcgtagatttgtaaggcattaaatctgagcaatgaaccaacaaacacttattcattatgaaaataaaactactacttacaattctcttattggcagaaataataaccgccaatgcacaaaacgcagaaaaagaatatttaaagaaagtacttaccaatttagaaaagattgaatctgcaacctactatgtcactaacgaaagctggcaacctagtgattcaaccgcattatttaccttgcatggcttcgttaaagagtacgataatccaatggactcaaccataggcgcaagctatgtttcactagatgccaatgatacaacaaaactagaattttgttatgacggcaacataagagtattaccttatcacgaaaataagaaattagcaattgatgatttcacattcagaccacttcctttcagactagtaagtcccccattcttcaaccatgcaaagaatatcatcaaatatgcacttaccactaaggatcatattgtaacagagttgaaagacgagggcgataattattatttcaaattagtaattgatgagaatcaacaagttgaattctttggaaaagcttatcatataccacttcccccattcgatatcaacagtacaacttctatttatgagttatgggtcaacaaatcgaatgacttaccttataaaaaacgaagagagatgtcgcatgatatttccgtttcaacctgttcgaatcttgaaatcaataaactaacaatcaacgactttaatgcgactgattatttcccaaaagattatgaaatagtaaaatacagcgacctctacaagaaaaatgaagaatcaacagcatccgaacttatagggaaaaaagctccagactggatattagaaaatatagaagcacaaccggtatcattagccgactgtaaaagcaaaatcatactaatcaacttcacaggcattggttgtggtgcctgtcaggcggctgttcctcttctgaaacagttaaaaggattattcaccagtgaagagtttgagttgattgcaatagaatcctggagtcgtaaagtatctgccatccggaattatgcaaaccgaaaggaattgaattataccattctaaatgcaacaaatgaggttatcaaacaataccagaccggtggtgccgcaccctactttttcatagtagaccaagaacgaatcatacgaaaagtaatcagaggttatagtaatgagaatacagataaagaaataataaatgcaataaaagaactactatgaacatgaacagactatttacttgtctttgtttgtccttgttattcaacctggcacaagcacaattacccatccccgaatatcagaaaggaaaggccattttaagtggtacaatcgccaattaccatccgaatgataatctgatattcaagatcggagctcccaatatcgtgatgggaacagccgaaactctttatccgactgttgagtcagacggaagctttactattaatattcctctctaccatcatacacaagtacggatgatgataggaaatgctgatttagtcattctgctaagtcccgaaaaagaaacaaatgtagctatcaatctaagtaatccaccaggaaaacagtttgtatttagcggtcaatatgctaccattaacaatgaatggtgccagccggaactaataacaaagataccacctgtttatagtgatggcgacctattggattccattgtaggcattagtgccaatgaattcaaaaaacgatgtatcaaccaatacaaacgatatgtaacgcacaacaacgcacagttacaattcagcgaagacactcgcacactcgccaatctctcatgcgcatttgattgcctggaaaatctacaggccacccactattgcctgcaaactgcttatcaaaagaaggaaaacattacgcgggaacaagcttttgctgcttttcttgatgtatatttgcccgatgatttccacaattatttgaaggatttcccagtcaatcaccctttagcactctattgttataattaccgcaatgtagtcatggatttatatgatacccacaaagacccactcgcttacgaaaaaaatctattgaaaaatgcaccactcactaaagaggaacagacacttatccatcaatatgaaacggctttcaaagcaggtatctcctttcagcaagaaagcgagctaatggcacttagtgcaaaatacttcaaagaaaatgacctattcagatgggagtcattctccaaagcaaaagaacgtcttagtaatatcatacaagacagcacaagtttaatagttgactacatacgagcaatctatatgcgttccagtttttacaatttacaacctctgacaccccgacaagagctcatggcttcggaaattaccaatcctattttcttaggtatcattcaagacatgaaccgccagatgcaaccccgacagaaaacgataacaaagaaattcactatttgcgaagcaccacaagttccggaaaaggaactgttgactgctctcattgcccgccacaaagggaaggtacagtttatcgacttttgggctacctggtgcggtggctgccggcaaatcatcaaggaatatgaaccactaaagaaagaaataggtgaagacaaagttgctttcatttacctcacaggccccagttctataaaaaagacttgggatatactaatacaagacattgccggagaacattactggttgaacaaagaacagtggggttatctttggaatcattttcagatgacgggattaccgatgtacctgataatagataaaaaaggaaatatcgcaaaacaattcacccacgtaacagccaaagagttgaaagagttgctagagttagaagtcaacagataaggtgcctagctacaaatgcaggaaacaggttcttcgtcaaatctggtgaaaagttgtcctctattcatttatataattcagtagatgcctgtttttctaaaggatttaccacccaatttgacaaagagccgaaagcaatgagaagtgtgccaaagctccttaataaacaaagaatcacctttaccacagataattgtgataaaggtgattctttgtttattaaggttttgtattgccctcttatatcgaattcacattgatctacaatatatatttagaaattaatcatgtgcataatcttctccgtcgcaccggcattgctagtcacataataaccggcattcgttccggtttcccgcaaaaacacctcatctgtcaggaaacgatccagcaaagttttcagttcatcatagtctttgatagaataggcaccttttgcttccagcaattgaacagcctccatgaatttctgatacttcggtccgaaaatcaccggaataccatatacagccgcttccaaggtgttgtggattccgaccccgaaaccaccgccgatataagctatttcaccatagcggtaaatagaggacagcagtccgaagcagtctataataagacaatccgctttcaatacattcctctcatcggcacgggtatagcgcacatacggacgcttcagtttaccgatgatctcaaccaggtgattctcatcgatcacatgcggagcaataatcagtttcatttccggatgattattgaaatattcgaggaataaatcctcatcaggtccccatgaacttccggcaacaaaagtaaaggagttgtttcctttaaatttctccaccagcgggagttctttcgcctcttcacggatttgcaacacgcggtcaaaacgggtatcccccactactgtcacacgactgatgccgattttcgacaaataacgtttggatgcctcattctgaacaaacagatgatcgaaatctttcaagacattgcgataagtgccaccgtaccatttaaagaatatttgttcgcgacggaaaatagacgacacactatataccggaatacggcgcttgtgaagctcatccagataattcttccaaaactcatatttgataaagaacgccatgcaaggatttgcaatatccaggaacttcttcacattcctcggcttatcaaacggcagatagcagacaatatccgccccccggtaatgcttgcgcacttcataaccggaaggagaaaaaaatgtcagcaatatcttatagttaggatatttctcacgaatcatttctatcagagggcgtccttgttcaaactcccccagtgaagcagcgtgaaaccaaatatactgttcccctttttccacttgttggcgtaagagttcatacaccacccaatgccccttcatcatcttccgtggcttacggctaaacggagcagccaaatggacgataaagtcataaatgactattgccaggtcgtaaagcatagtactgtgtcgattacttcaaaacctctaccgctcgtttcatacgagctatcgtctcctctttgcccaatacccaggaaatatcgaacatgtgcgggccttttccttcacccaccaatgtcagacggaaagcattcatgatattaccggtatggtaacctttctctgcaatccagtccataacgactttttcctgtccttcaatgctaaaatcttcaataccggcaatcacttctgccaattcggtcatacatttggcagaatcttctttccagcgtttcttcaccgtcttttcatcatattcggtaggagccacaaagaagaagctacatacatcccacagttctttaatgaaacttacccggtctttcatcatgccaaccacagtcactaccttttcgaaaggagcctctacgccttgttctttcaagaaaggcaagaacagttccgcaatttcttcgttaggtttctgctgtatatattgatgattgaaccatattccttttttatagtcgaacttagctcccgacttgctgcaacggtgaagatcaaacaacttaatcaattcatccatcgacatcacttccagatcattacccggattccatcccaataaagccaggaaattaatcacagcttcgggtaaataaccggattcgcgataaccagaagagatttctccggatttcggatcgtgccattccaatggaaatacagggaatccgagacggtcaccgtcacgcttgcttaattttccattaccttccggtttcaataacaaaggcaggtgagcaaattccggcatcgtatcttcccaaccgaaagcacggtacaacaacacatgcaaaggagcggaaggcaaccattcttcaccacgaatcacgtgggaaacttccatcaaatggtcatccacgatatttgccaaatggtaagtaggcagttcgtcagccgatttataaagcactttgtcatccagaatagatgagttgattactacttcgccacgaatcaggtcatttacatgtatatcttcattcggttcgattttgaaacgaacaacatattgtttgccttcagcaatcagtgcatccacttcttctttcggcatagttaatgaattgcgcatcataccacgggtagatgcatcatattggaagttagcaatttcagcacgcttagcgtccagctcctccggagtatcaaaagcgatgtaagcttttccattttccagcaaaatctgcacatatttcttgtagatttcgcggcgctccgactgacggtatggaccctgttcaccaccgaagctcactccctcgtcaaagtggatacctaaccacttaaaagattcgagtatatactcttccgctcccggaacgaaccggttagagtcagtgtcttcaatacgaaatatcaagtctccgccgtgttgacgtgcaaatagataattatacaaagctgtacgcacaccaccgatgtgcaatgctcccgtaggacttggagcaaaacgaactcttacttttctttctgccataatttgggttagtataggtaaatcgtggcaaaattaaacctttttttccacactattgtttttttttgtacttttcgcaaaaatttcagtggatatggaacatttgaagaagaaaaaaagattttcatggagagatttactatataaatcactgctgtttgtaggcactgtggcgctgattgtttatttcctgccacgtgacggaaaattcaattaccagttcgacatcaacaagccctggaaatacggacagttgatcgctactttcgactttcctatttataaagaggatgcagtggtaaaaagggaacaagatagcctgatggctttcttccaaccttattatcaactggataaaaatatagaaaaagacgcaatcgccaagctgaaagagaattaccatacgaatctgaaaggtattctcccttccatcgattatttgcggtacattgagcgcactttaaaagaaatctatcaggcaggcatcgtttcgacagagaatatacagctgcttcacaaagacagcacttcatctgtcatggtgattgatgacaaactggctaatccacaggctaccgagaatctttacacggtaaaaaaagcctatgagcacttgctgtcagcagactctactcatttcaaccgggaaattttaaggcaatgctccctgaacgaatacatcacccccaaccttacctttgacgaggaacgtacccaggctgccaaagaagaaatcctgaacaactattcctgggcaaacggattagtagtcagcgggcaaaagattatcgaccggggggaaatcgtcagcccgcatacctataatatcctggagtcattacgcaaagaatccatcaaacggaatgagtccatgggacagaaccgtctgattctcggcggacagattctgtttgtaggaatgctgatgctttgttttatgctttatctcgacctgttccgaaaagactactatcaacgaaaaggcagtctgtcattgctattcacgttgattgtattttacagtgtcataaccgcttttatggtaacacataatctatttaatgtgtatatcatcccgtacgcgatgctacccattatcatccgtgtttttcttgattcgaggactgctttcctgacgcatgtcatcactatattgatatgctccatatccctacgctttccgcatgaattcattctgacacagttggcagcaggattggtggcgatattcagtctaagagagctatcgcaaaggtcccaacttttccggacggctttattggttatactgacttatgcagccatttacttcgccttcgaattgatgacagagaacggtctttccaccgacttctcgaagttgaacatacgaatgtacacttacttcatcatcaatggaattctgctattattcacctatcctttactctttttattggaaaagactttcggatttacttccaatgtaacgttggtagaactttcgaatatcaataatgaccttttgcggcaaatgtccgagacggttccgggcaccttccaacattccatgcaagtggccaatcttgctgcagaagcagccatccgtattggagctaaaagccagttagtacgtacaggagctttgtatcatgatattggtaagatggaaaaccctgcttttttcacagaaaatcagtcaggaggagttaacccgcataagaacctgaattacgaacaaagtgcgcaggtcgtcatcagtcatgtgacggatggattgaagttagccgataaacacaatctgcctaaagccatcaaggactttatcagcacgcatcatggacgggggaaaacaaaatatttctatatttcctggaagaacgagcatccggacgaagagccgaatgaagaactgttcacctatcccggcccgaatccgttcaccaaagaacaggctatcctgatgatggcggatgccgtagaagctgcctcacgcagtcttccggaatatacagaagaaacaatcagcaacctggtcgataagattatcgattcccaggtcactgaaggttactttaaagaatgtcctatcactttcaaggatatagcaacagtgaaagctgtgttcaaagaaaaactaaagattgcttatcacacccggatcagttatcctgagttaaagaagtaagcaaacctgcgcaagcatcttcaagaacatcaagtacatattcaaacccctcggcccctccataataggggtcgggtacatgatctgcaggaatacgggtgcaatactccgtcatgcgatgaatcttcttccattcttcgggagaaggagctttgtctttcaagtcatctatgttccggtcgtccataccgataatcagatcaaaattataaaaatcttccgtacggacggggcgagaacgatgcaccaattgataaccgcgacgggctgcatgagcacgcatccggctatccggcaattccccctgatgataagacaggattccggcagaatctatcacaaattctttttccagtcccgcttcttctattaaatgaagcattacgccttcagccgtagagctacggcagatatttcctaaacagacaaataatattttcttcatatatacatgattgtttctcaaaaagagttcagtatctgattggcccggttcacggttattgcggccgggatttccggcatactacccaaattgaacggagcaagcattttttctatcttctttaatccggccttatttccttttttctcaaattcctgacgaaggatattgatcttctcatgcgcctgtattccttcaatcaaacgctcgaaacgaatacagctacgagctcccggatatacaaggtaagtatctccgcctgcccaactacggaaacgggaatcgagcagcggttccaatggccagctgttatatgcccaacgcagataaccatccagatgtttcttagatgaataataactcatccaggctgcttctgcaggatcagagaaagtaaacgtgttgggatgggcttccgtacagcaggtataataattagtacgcttgttctcggcaacacgacgcagacgcacttcttccgggaagttctgtccgataacaatacaataatcatatagatcgggctcaatttcttcatgatagttcccggccaacgatactttaaaatccggatcagctttacgaatcactttcaacgtcttctgcatcacttccatcggacgttcgtccattgcaatagcacaaatatcaaaccatcctttttctttcagatgcttggagaaagaggcaagcatcgctccccacatttcttcataagccgcatcacccggtgcagttttcacgaattgcagagagttggttgcctgatcgtagtattggaatgacaattcccatggaaccattgagtaacaattaatctgtttatcaatgcctacactcatcataaattccacccaacggtcgaagatagtataatcaaaagcccatgttccatctgcccgtttcatccaggtgaccattgtatcaaaataatcttctgtctgaccattccagggtttatgtgtcaaagtagccgtgataatcttctgtccggcatctgccaacattttcatcaaaggacgcatagcgtcaaaatgctcctggctccataaaggaacctgataataacgtgccactgcataaggactttgccataaatccaagtgataagcccattccgaaggttgaggaagttcacgggaagaaacggtaatttcgagattcaggcgttgcaataaacgcgagccgtcattgattaacaattccccttgataagttccgggagtagccgattgaggaatccaacactgcacccagaccggttgaacagtacgagcgggcaaagccatcgttttcaggttggtatcaataggatcggccaccaataatgaatcataatctatagacttccgatatccgcaggcacctctcccatccttattcaattcatccgtcatcacataacggacaaaaccacctgtaaatgcatctttgggaagaacatttccctttttgtcttcaaaatcaccaaagctgaaattcaggtctttcagttctacgcctgtccacacaacagcttgcgcgttcacacgttcaccacgccagcctttcagggaaacagtctgttgtttcttcaactgcgggagttgatgttttgcataccgagtatctgttgtaccccaagaaacttgggtggaagtcaccgctgcccactctttatcagaaggtgcagtaggatcaggtaactcctgataagtcagtaaagggaacttcggttgtcctgtcggaacgccacattgagttactccctgctgggcaaaaactgcacccatgctaaagagacaagtcagagaaaaaatagtaagtcgtttcatggttagttaattaaatgattaaaggttattatatgggggaaaattattaaatcacatagggtctacatcataatagacaatcaaagatttatagcgttcgtccgccaacatctcgcgctggatacgtagcaacaattcccgtgcacgtcccatcggggcattctgctcaatcttgacaacaatcttcttgataaacaaagtctggatacgggcaacaggaggtttatccgggcctaatacccgattgccaaatacagcccgcaacttatccgccatcactgccgccatctgatccagcaacgcttcattatgatttttcagataaacatataccagccggtaataaggaggataatggaacatctgacgttccaccaattgtccgcctaccatatcttcataatcattggcaatgacctgatgaatgataggatgatcgatgctcttggtttgcaataccacccgtccgcgtttattcttacgcccggcacgtcccgctacttgtgccatcaactgaaaagcacgctcataggaacggaaatcgggataattcaacatggtatcggcattcaatatacctactatactgacatgatcgaaatccaacccttttgataccatttgcgtaccgatcaatatgtccgtctttccctgctcaaagtctgcaataatcttctcataggcggaacgggtacgtgtagtatccaagtccatccgggctacggcagcttccgggaaaaggattttgatgtcatcttcaatcttttccgtaccgaaaccacggttcaccagttctgttccctcgcaggcaggacaggatttcggcagttgatacgtataaccgcagtagtgacaggttaattgattgattcctttatgataggtaaggcttacgtcgcaattcttacacttaggcacccaaccgcaggtacgacactccaccatcggagcaaacccacgacggttctgaaagagaatcacttgttctttctgttccaaagcctctttcatatattgtatcagaagtggcgagaattgtccgaccatccgctttttgcgatgcagttccttgatatccaccggaataatctccggcaactggatttctttatatcgttctttcagttgtacgaaaccatattttccctctcttgcattctgccatgactcgatagagggagtggccgtacccaacagggttttagctccgtacatggcggccagtacaatagccgcgctacgcgcatgatatcggggagcgggatcttgttgcttatacgtattttcgtgctcttcatccacaatcaccaatcccagatttcggaaaggcaggaaaatagaagaacgaacacccagaataatatcatacccgttctctcccagttgcttccgccatatttcaacccgttcggcatcagggaacttagaatgatagatacccagacgagcaccgaagacccgttgcaaacgctccgtgatttgagtggtcaatgcaatttccggcaacaaatataacacctgctttccctgacgaatcgcttcttttatcagatggatataaatttcagtcttaccactggacgttaccccatgaagcagacagacatttttctcctgaaaagactgcacgacttcatcaaatgcacgctgttgaaactcattcaaaggatttaattcgacaatctccttctcctgcttatccaaccgcccgatttcatggtagtagatttcaaaaatcttcttatccaccaatccattcaatacagaaggagccacattagtccgctgcaacagttctttcttggagacttctttcggagttcccgctcctaaaacgccggaacactccacatacttcatgagtaatgccaactgcttcggagcacgagacagaatatcaaacaggatatgaagccgcttttcatccgctgtacccgcaagccgaacccgtgcctctgttttaggtttataagtacgcctcaactcctcctttacgaaaatcgcttctttatcgagcaaagacttgatgaccgtaagaatatttttgataccactgtccttctccagtttagtgacgcactgttgcgaatctacggcaagtaaatccaaaatacgttgctcacgttccggcaatggcgcatccgcttcaaaatcaggattatattcaacgatcgtttcactctccagtttcaggccggagggaagtgccgctttatagacatcgccttgtgtacagagataataatcagctatccactcccaaaatttgaattgagcgggtaacagaatgggagaagcatccagcaatgcagatatatctttcacttcgtactccgttggagcacaataatgaacgttaaggacgatagccgtataaaacttcttccgcccgaaaggaactaccacacggcagcctatcttcacatcttccgcacattcatccggcaaagagtaagtaaaactcttcggaagcggaagcggtaatatgacatctacatactttttcattgcagctacaaaaatacaataaaaaaatggggatttaaaagaagggagagagaacacttaaaaagaaaactctacttcatacgagaattggaagaaatatattcgagagcgcaacaggacaatcccaaacaaaaaagagtttccggttatcggaaactctttttcatatactatgtaaagtgatagactacttaaaaaatataggccacagatacttgccaagtcttagtcttataagaagcatttgttccttcaatatcagcagtattacccaatgggatattgtaattagcccccacctgcaaatggttcagcaacttcaaaccggcacccacattgatacctacttcagctttcttcttatcaattcccgatttcttttcaaaatcgaaataaaagtcaggacctgcagccagataaataccagccagacttcccaagccaatggtatatttcaggtttacaggaatatcaataccgttttgtttaacagtaatatcatcatttccttctgaaactttgataccccgttgagcaaaaagcaaagatgcatctactcccaaccctacgattggaatattaaactcggccatcggaccgataaagaaacctgtgaaattatcctttttaaagttttcgctcacattagagaaactcgcctttgacaagttcaaacctccctttacaccaaagtgtatctgcgcctgagcaggcattgccatagctatacatatagcaatcattaaagcaccaaaaatctttttcataaatttacgtgtttataattcgggacaaagatatatatttagattaaataaacacaaattattggttgtttgttcatttaaagacgtcgttgtccctcctgacgaactaataagaatttcttataagttcgattttatctaattggtacggttatgaagcaattgatattttagcaaataagtattgaattaatccgattttacttcctgattttcatacagattcttttcagccaacaggtacagcaagtagtctgccccaagacgagttctttttccaacttccgcaaccggtcacattgtttcagccatttgatttgtaaggtatcatagaggattccggctgctttatatcttgtgatttctttgtcctgttttcctaaaagtgataggtatattgaacaaagttttgatttatctatgcaatatcgttccagtttttcgatatacatcaaggtagcccctttttcatttcgactcataaactcctgaacactgtcatcactgatgatgtcgatgcccgacctttcgtagtccacagtgatttctcgcatctctatcaagacccagatatattctgtctcgaatccgtactttgcggctgcctcttctatactaatccattgtgccatagcgtttgttttttcatgtgtgatacaaataagggatgaataatattttattcatgtatattagtacaacgggcatccacgcttttttgcagtctgccgggtggggattggctaggttaaattggggcaatttattaccgaccgaatacaagaaagacgcagatgctgctgtaccattatccgatcttaaggctagctacacccgcacaaaagataatgataacagcagacacccacgtcaatcgtttatatataacacatctcttacgaatatgttgatatacatccgttcacgtggagtatctaccgtatcatctctctttgtttggattggctatttctaagatcgagagataatacgcttttactccatataggaaataaaaaccgcttcctgcctgttccatcacgctgatgggctgaaagcgtacggcaaagatatatgttttttttgaaacgcagtcgaaatatggaaataaatactggaagttatgtattaaaatgaatctgacaaaaaacgactctacttctcattcttgattactgaaatatctctcacaaataaaagttatagcagtttttactctcacactctcacccattggttcaatccctttattcatcggcattacaggtgtgagggtaaaaaaatgatgaggttgtgtcaaaacgttggcacaacctcttttatattttacagttctgctatattttcttttggctatgctgctttttcctcatgcatttggcaacaagttgctatattccaattatatcgggttataaatagtcccataaacatatatttggcaactgtaatgagcccctttccttcttttatcagtttagcacacatttttttgatattaaaggctatagcaaagaaagcaaagtccattgtaaccttgtcttctcccacatgccggaatcttctgtatgccatgttgtatttcatttgtccaaacacagcctctggttctatacacctcctgcctctatgcttgataccttcttctgagagcaacctttcccgtgcctgccgtttgtattgatttaatcggtggttgacttctataatacggttcccccaagctttaaaacaactgccacgcaaagggcaaccttcgcatctttttgctttataccgggcactttcgatgatgtatccgctcgctgtcttgtcacgtttggttcctatacggttcatgtgctgtcccataggacaaacgtaataatcctcttgggcattgtaatggagactttcggcatggaatgggttgggagtataacgaggacgctgttctttatggaagtaattgtacttgatgaaggcttctatcccattctcctgcatgaaccggtaattttcttccgaaccgtaaccggagtctgccacacagatattcggtaaacggttatagcggtactggaaagagtggaaaaaaggtatgagggtcagtgtatcggtagggttgggaaacagacggaagtctgtgatgaattggttttcagtacctatttgcagattatatccgggtttggtctgcccgttcttcatggcatcttctttcatgcgcatgaatgtggcaccaggatcggtcttggaataggagttacgttctccaagggtatcaaggtgattgtcgtattctatcagcttgtcacgatacccttcaagttccatgacctgcttcttctttttgcgcagggctttcttttcttccttatcctttgttgcaggctggcgttccagggcttctttaagttcatccactatgtcagagagcctgcagggagtaaactccacggatgtgtcttttatagagttctcctgtgcaatggcttcatccacctgttccaagagaatacggattttatccattagtctcgtacggttccgttcgactgtcttgcgccagacaaaagtatatttgttggctttggattcaatcttggtgccgtcgatatactccacatcaaggctgatgaaacctttatcggcaaggacaagaaccaactgggtaaatacattatttatttcctcctttacacggttacgaaaacggttgatcgtgataaaatccggatgctcattaccggcaagccaaatataatgaatgtcacgaaggaggtgcttctctattttacggcaagaatagatattattcatgtaggcgtagattatcaccttaagcatcattttaggatgataaggacaacggcccgtttccttataaagcttcttgaaactctcaagattgagattgtcaataacagcattcacgatgcggaccgggtcggtcgcagctatgttttcatcaattctttgtggaaaaagaacggtttggttgggaatgtaaggacgaaaatgtaactttgccataacgaaaaactttatacctaaagatacgaaaactttgggtaataacaaagcccgggcttgagaaagtctgggctttgcgcataaaaaaaggctgtgtcagcgttttgacacaacctcatcacgtaagcgcttccactaatctgcacctacaacaaactgttatcatctgatatactgaacattaattatttccgcaagaagtattaacagctatcacctcaagtattaacactgtagacttcagccattaatagttgaaaaatcaggtattaacacatgggaaatggagtgataatacctgatcaatggtttaatatcatctgaaacaacaggtgaaacgagcgtatagatacagatgaaagcatcataccataataagattgcaaatggcttatccattaggaaagttccagtttccaataggacgaatgacagtttcatataatgatactaacagtttcccggtgagagactatagtttccccgtaaggaaaccattgttcccccataggggaaactttagtttcaagcctgcgaacagattgtttcaagcctctaaacaaattatttgaagctataaaacaaatttaagctgctgaccggaaattagccaaccagtaatcacgaggaaaacacaacttacccgacaactgaaatcaggatgatccacacacagcgtatgcgactagaaagacgtattcttactactctatgagaacaaagcattcaacgcttcgctcatgctgggatgagtaaagatgaaatcacgcaggaaagtataatcctgacctgttttcattgccatggcaactatattgatgacttcgccggcatcaggcgcaaacagcatacaacctactatttttcccgtattcttatcaatgacagctttcaacagaccgtccgtctctcccaatgtctttgctctcggtatcgccataacaggcaatttcttgataatcacatccaaatcctgcttacgagcctcatcctcattcaatccgatacgcgccattggaggatcaataaatacggagtaagcaaccggattacggtcacttgttttccgctccttatctccaaacaaatcttcacagataatccgataatcatccaatgaaatataagtgaactgcaaaccacctttcacatcacccacggcacgtatattcggattagttgttttcagatattcatccacaatgatcgctccacgtgcgtccgtctccactccggcaacttccagattaagatctttcgtattgggtttgcgccccgtagccaacaagacagcatcagcttcaagtccgaacgcttcacctgtttgtgagtcagaaaaaacaacgacagccctattttcaacatgccgcacagattgtaccttcacgttcatccgaaaaacaataccttttttctccaatgtttcctttacacttgcagcaatgtcacgatcttcacgagcaattagttccggataactctcaagcaccgtcacctgcgaaccgaacgaagcatacatagacgcaaactctaaaccaatataaccgccgccaacaataaccagccgacggggaagatcggttaattccatgattgaagtactggtataaaccaaagaattgtccgcaattccttcaataggcggaataattgtttccgctccggtgttgataattatttgctttgatgttaaccatatttcttcagtagatgtacggacggaaaccacatcggcagatacaaaagaacctacacctgtataaactgttacattaggatgatctgccagattatggtaattcttatctctcaacgcacttgtcacagactccttcacagcaatagcattgcgataaaactctcttctttcttcaaacgtcgaattcttcatgccggaagcaattttagcctgatgaactagcgtctttgtcggaatacatccgatattgatacacgtccctccatacattttatcagaacgttcaacaatggcaactttccgcccacgttttgcaaactctgccgcaagggtctttcctcccttaccgaaaccgataataataacatcaaatgcattcatatctatataacttttaatgggttcaagacttgcttattaggttaacaacgaatgatattgcaaagttcgtcgctttcgaagtaataaacaataaccatttcgccggatgaattagcaattattcccgtataaggtcaaagtaataaataatcaaaaatcgccggaacagatcaatgatttgcccggcgatatctcatcttaaaccaatctccacttactatatatcaatcaacgattcgggtgaatgtccaacttcaccggtttaatcatattttccggttttaagatagtatccaggtcttccttggaaagaatgttatgttccaaaacaagttcataaactcccttccctgtttccaatgcttctttggctattttagtagagttcttatatccgatcaccggattcagggctgtcactactccaatgctgttatgcacatctctccggcatttttcttcattagccgtaatgccgtcgatgcataaggtgcgcaaagtgtcaaaaccattcattagtaaatcggcagactcgaaacagcattgtgccatcaccggctccattgcattcagttccatttgagctgcttcaccgctcatggccacacaaaggtcatttcctattaccttgtaagccacctggttcatcacttcaggaatcaccggattcacttttccgggcatgatggatgagcccggctgcattgccggcagattgatttctcccaatccacaacgcggaccggaagccagcaaccgcaagtcgttacatatcttattcattttaacagcaatacgcctcatcactcccgaataacctaccatgcaggaagtgtccgaagtagctcccaccaaatcgtctgctagtttgatatccaatcccgtaatcttgcgcaaagcggcaatgcacttctccgcatattccggttcggcagtgattcctgttccaatggctgttgctcccatattgactgccagaaaatcttgtgcagcaaaatcaaggttctttacttcatgtgacaaaatacttgcaaagccattaaaggtttgcccaagagtcatcggtacggcatcttccaattgggtacgccccattttgatgacatgtgcaaactcattcgctttcttccggaaagactcgatcagaacctccaaatgcttaaccaatttcaaatgagtataatacagtccaatgtgaatggctgtaggataagcatcgttggtggattgcgaacggttgacgtgatcgttaggcgaacagaattgatactctccccgctgatgccccatcagttccaatgcccggttggcaatcacttcattggcattcatgttggtggtcgtaccggctcctccctgaatcatatctaccgggaactgctcgtgatgctttccttcgagtatttctttacaggctctcaagatagcatccgcttgttcttcagttaataagtccagttcacggttggcaacggtggctcccatcttcgtaatagccaatgcctgaatgaacaaaggatattcattcaaatgaaacttgctgatgcgaaagttttcaatgccacggagtgtctgtactccataaagtgcactttccggcacttcacgactacctatcaggtcactctctgtacgagttttttttgataaattttgttccatatcggttgttttatagtaataacgttttcgttagttcttataataaccaaccaacgatgttattgttttaataaatatgcaaaaactattcaaagacttttttgttgtaaatagaagaaaaagaaaatacaaagagaagaatcgcttatctttgtttttgaatttaaaacagcaatctatgatattacaattagcatttgttctgacagccattattattggcgcacgcctgggaggtatcggacttggcgtaatgggaggcgtagggttggcaatactcacgttcgtttttggtttacaacccactgcgcctcccatcgacgttatgttaatgattgccgccgtaatctctgccgcttcctgtatgcaggcggccggaggtttggactatatggtgaaactggcagaacatttgcttcgtaaaaatccttcacacgtcactctgcttagtccgctggtgacttacctctttacttttgtagccggaactggacacgtggcttattccgtactgccggtaattgcagaggttgccaccgaaacaaaaatccgtccggaacgtccgttaggtattgccgtcatcgcttcccagcaggccattacggcaagtccgatctctgccgctaccgtggcacttctcggacttttagccggattcgacattaccctgttcgacattctcaaaattacgattcccgccaccatcattggagtgttggtaggcgccttgttttccatgagaatcggtaaggaactggtggaagatcccgagtatcagaaaagattgaaagaaggtttattcaacaataaaaaggtggagattaaaagtgtcaagaacaaacgttcggcaatgatttccgttatcatctttatattggcaactgcttttatcgtgcttttcggttcttttgaaggaatgcgccccagtttcctgattgatggggaaattgtcaccttgggaatgtcttctatcatcgaaatcgtgatgttgtcggctgccgcaattatcctgctagtaacgaagacagacgggatcaaagcaacgcaaggttctgtatttccggcaggtatgcaggcggtgattgccatcttcggtattgcctggatgggagatacctttcttcagggaaatatgggacagctgactctctctatccagggaattgtgcaacaaatgccgtggttgttcggtgtcgccctgtttgtgatgtctatcctgctatatagccaggctgccactgtacgggcactcgtccctctgggcattgcgttagggatttctccttatatgctgatcgctttattcccggccgtgaacggatatttctttattccgaattatcctaccgtggtggctgcgattaatttcgaccgtaccgggacaacaaaaatcggcaaatatgtgttgaatcattcgttcatgatgcccggtctggtatcgaccgttgtggctattgcactaggtttgctttttatacaaatattctaatagatcatattattaacctaaacatcattcagttatgaaacaattcaaaagctttggactggtagtagtcacactactgttttccgtaactatggcattcgccgcaaaaccgaatattcatattcttgctacgggaggaaccatcgcaggtacgggaagctcggctaccggaaccagttatacggcaggacaagttgccatcggcgcactgctcgatgctgtacccgaaattaaagacatcgccaacgtaaccggagaacagattgtcaaaatcggttcgcaggacatgaacgaccaggtttggttgacgcttgccaagaaaatcaatgaactactgaaacgcccggacattgacggcatcgtgattactcacggaacagacaccatggaggaaactgcttacttcctgaatctgactgtcaagagtgacaaaccggtggtattagtaggcgccatgcgtccgtctaccgctctaagtgccgacggcccgttgaacctttacaatgccgttgttaccgcagccgcaaaagaatcgaaagacaaaggagtattggttgccatgaacggcctgatcctcggagcgcagagcacggttaaaatgaatacggtcgatgtacaaactttccaggctcccaactccggcgcactgggttatgtactgaacggaaaagtgttctacaaccaagtaacgctaaagaaacatactacccagtccgtttttgatgtcactcatctgaacgcgcttcctaaagtaggtatcgtgtacagctattccaacattgaggccgatatggtaactccgatgcttagcaacgggtacaaaggcatcatccacgcaggagtaggaaacggaaatattcaccagaacatcttcccggtactgacggatgcccgccaaaaaggtattcttgtcgttcgttcttcccgtgtcccgaccggacccaccacactggatgcagaggtggacgacgccaaatatcagtttgtggcttcgcaggaactgaacccgcagaaatctcgtgttttgttaatgcttgcactaacaaaaactacagactggaaacagattcagcaatatttcaacgaatactaaaaacctgacttacttatgaaaaaatggatattcatgctgctcctcgcgggtagcatacagggaatatatgctcaaaaaacagagaaaaaggagaaattcaatccgaacactcccctgtttgaagagctgacagacgtgaaaaagaaaacagataaattcaatctttatctgaatatgcaagggagctttgacgctcatttccagaatggttttcaggagggtgactttaatatgcaccagcttcgtatcgaagccaaaggaaatatcaacaactggctgtcttaccgctatcgtcagcgcctcaaccgctcgaacgatgcaaacggcatgattgataacctcccgacttctatcgactatgccggaatcggtatcaagctgaatgaccagtttagtctttttgcaggaaagcaatgtgccgcatacggtggtatcgagttcgacctgaatccgattgacatctatcaatacagtgatatgattgattacatgagtaatttcatgaccggattgaatgtgggttataacattactcccgaacagcagcttaacctgcagatattgaacagccgtaacagttctttcgataatacttacggaatcacagaagatgccgaaggtaatctccccgatctgaaatcgggcaaaatgccactggtttatacattaaactggaacggtaatttcaataatgtatttaaaacccgttggtcggcttctgttatgaacgaggccaaaagtcacaatatgtattattatgctttaggtaacgagttgaatcttggaaaatggaatgcttttgtcgatttcatgtattcaaaagaggatattgaccggaagggaatcattaccagtatcgtaggtcgtccgggcggtcataatgcttttgatgcgaactatctttcggttgttgccaagtgtaattaccgctttcttccgaaatggaatgtttttgtgaagggtatgtacgagacggcttccgtaggcaaggcgtccgaaggtatagaaaagggaaattaccgtacctcctggggatatctgggcggtatcgaatattacccgatggaaaccaatctgcacttctttgttacctacgtaggacgttcgtatgatttcacttcccgcgccaaggtgctgggacaggagaattacagtactaaccgtatttctgtaggatttatctggcagatgcctgtattctaattctaaagcaagaaaccgagatgacaataaaaaatacccgatagcttcttacaacagttatcgggtattcttatatgttcggtctttttaaatcaatactcttcctcgttaaagaagaaatcctccttactaggataatccggccaaatatcttcgatactctcatagatttcgccctcatcttccatctcttggagattctcaataacttcaagaggagcacccgaacgcatggcataatcaatcaattcgtccttggttgccggccagggagcatcttcaagttttgatgctagttccaatgtccaatacataatcttgagtatttaaaatgaatactaaatttgtctcgttttctatttttcggcaaaagtataataaaatctatcatttccaactattatcccaaaatatttcattattttgctcatcaaaattaatttttcgggataatacaaacaaataatctgataatctgttgacaaatgctaatacttcgggagaaattgtacaagtttcggataaagccagaatacgtctctcggctctcctgcaaatagtacggcaaacatgacaaacggctgctccacgactcccgccgggaatgatgaaagcgcaaagttcgggcagttgttcgtccagcttatcaatctcccgctcaatattctccacgttttcgggagttatgatgctggcagccttcagttgcgttttttcctggtcggtggccagatgtgaaccgatggcaaatagcttatgctgaatactcaaaatgaaatcacggtctgattcatcttgcagataggtattcaaccatcctagatgagaatttagttcatccacagttccgtaagcttccagacggatatgggtctttggaacgcgacttccgccgacaagactggtagttcctttatctccggtctttgtatatacaaggctctttttcataatcttcttttttacttattataaggtaaacgtacaaaggttcttagaagttgacaatatactgctgttttatcttcgttttatcaaaaaatagtaaaccgacgtcgtagaggtcaaaggtgatgcctactctttcatcagcctgcagctttttccaaagtgctttcatctctttggaatagcagatgccatggactacaaatacacttttaggagtggcacgatgtgcacaaacccggaagacttcttccagtaagtcgggattccggtagtcattcagatacaaaaagtcgactgaagtgtctgcatccagaaacagttccgacaagtcggaagcaaaaaggtaggaagccgatggtttagcagactgtaagtagagggttgtggaggaaggacgcccaacttctataatcgtatcaggctgtactctgttcaccaaccggaacaggaaacggtttaccttttgagaacctttagtccacccacgctctcttatcatctttttctgttcttttttcaaagaagaataggcatagtaaggcatcttctcataaatcacatcggtaatcagactaaaagcaaaaggggaatgtacgccatatccgcaacgataacgaaagcgggaaagccagataaaaggtctttttatacagagtagaagattcataaaacaatcattcgtatttttattctcccgacaaagatatatttttttattgaaaaagggtcggttcccataaagaaccgaccctcatactcatttattccaagttactactgtagtctgaatgataccggtacagtaaatttcactcgtactttcttaccattttgcactccgggagtccatttcggcatagaacttatcacgcggatagcttctttatccaaataaggatcaacccctcgcacaacttcaggattggaaatcgttccgtctttgtctacaacaaactgaacaatgacttttccttgtgaaccagtttcctgcgaaatcgttggatatttgatattactacttaaatatttcattaaagcagctgtacctccaataaactccggcatgacttcaacacttacgtgaataacgtcttcaactaccgtttctgtttctaccactgggggtatccaaataacatcatgaactgcattcatatcctctgacactgtagaaacgttatccgtcacctccatattgttttccactatttcgaacaattctgttaccttagtttcgggaggaggaggcggttccagtttctcttcagggaatgtgattggaactagctctgttacaaagatggattcatcatctggtgatagtgctgcaactctgacatcatgttgtgtccattcgaacgaaacgaacatgaaggctagcgcaacaaccaaacccatcaacaaccaagaaccccgttgattctcaattgcagccttttttgatttcttggcttccataaaaaatgtgtttaagtaattaataatagaaaatatatagtatatatactacttttcgtttttcctcttaagcattacttaaagtgctctctcgctgcaataaatataatcgttttatggataggttgttacgacgtctcttgtttattttattcttttctcttcttttggataaaatttatgaataattcggctttagtgagtttagtatgagtaaacgtttctataccactatttttcatatctcaatattgaacataaattgtactaagaccagtatgaccggacgcctgcaatgaatctccagaataggtcagatgcatagagattccgttataatcaattttcaccggataagacacctgctgccggtctattggaatgagtacatcgagtataccttcatcgttcgttttcactttcagaaagccaaagtcgaatgttacacctataagttgcttttccgtttcattatctacaatacagtattgaatatgcccaaacgtttcaggattccgttgaataggcaatgccatctttgaagtaatagatacgattgtgtccaacacatagcaaccataagcctttgcaacaattctcatattctgtcctttatactttcccggaatgttgggaaacaaaacagcattatccaaatcttttagaaccactgtgcgtagatcattttcacctagaaacagatacagactgtctgtttcatcggcactaagtgggagagccttgcaaggtgtttgtgataattgcactgctaaatcgaaaggacgtgaatgaattgcgttcactgccagtccgatgataatggaaagaacaacaatcatcaaagcgaccagcttaacgagaaaatgctttcgacggttccataatacgccaaagtccacatcaagcattcttgccacaagacggataaatgcttgatggaaacgtatcgcatggaatcttgaattttccgcctgcacatcaatccccaaaagttccaatccgcctaacgtcagttgagcatgaaaacattcccgatctttggaatgaggaataccgtcaatgataaaaggtataatctctctttcgcgtcccttcgagcggaagtaggcaatctcctcccctacatatttcgattgtgccgaattcggcgaacaaatgacaatcagatatttcgattcatccaatttatgatgcagttcgtcactaagtacaccactcgtcagttcatcagcatcacgaaagactttaaaccgtttaggtgcctccggcttcattttctgaatcattgtcggcaaattgtacgattctaataaaaactgtaatcgcttcgccgccttaatgtccgtatgacgatagctaataaaagcaaaaaaattgtgtgccatttcgtctgatttctatttaaaattaaccacatttgataacattccactattttttctttttcctacacattcatgggatatatctgcaattgcatgcctatcatattattgttcaaatcaaaaacattaatatatttgtttctatcctccatcagcacactcaagaacaatatagttttctgacattcctcgctcaaaagcgaaagatcttttcggtgatggttcctaatataatatgagttttcataaattattttgttgtttcaggagattgtaataccttactattagcaacattaatcaaatccataatttcctttgtcaaaggatgattttcaccataaacagacaaacggattttcaaggacttctcataatagttcagagctttggatttgtcaccttgaattatatacaaactccctatactataataactcaaagctacctcaggatggttctcaccaaaaagagacaaacggattttcaaagactcttcaaaataatataaggctttagaataatctttttgagcaaaatatatttctcctatatgatcataaatagaagatacttgagaatgattttcaccataaactgacaaaactattttcaaagactttttaaaataatccaaagctttgaaatcatctccttgaacggaatatatttctcctatatcattgtaaacagaagctactcgggaatgattttcaccataaactgacaaacgaatctttaaaacctcctcaaaatattccaaagccttagagtaatccccttgagcaaaatacacatacccaatattataatatccggaagctacagaaggatggttctcaccaaaaaacgacaaatccaatttcaaagactttttaaaataatccaaagctttagaatagtcattttgagcaaaatatatctgtcctatataactgtaacttgtagctacagcagggtggttatctccattaagcaacaaaaatattttcaaggccccttcaaaacagaccaaggctttggagtaatctccttgatttgaatatacacgtcccataccaatagatacattggctattccccatgaagcgttctcaccgtaaatcatcaaatagatattcaaagacttttcataatattccaaagctttagaacagtcatcttgagcgaaatatatctgtcccatacgttcataatcattagccacaatttcatcattttcgccataaacagatagccgaatcttcaaagacttttcataacattccaaagctttagaatagtcatctagcttctcatatattccccctattataatgtaactagttgctttgtatgtatcattgtctgttgtattcaatgcagacaactgataattcatagcccgattgtaatcagccatataatcttcttcaaaccttcccgctgcaatcaaataatcccaatttgttggagcagctttcgtgagaatctcataataatgcgaaaccgaatcattcaaatgctgcatcttgaatgattcgatagcagtctccattttcccaaaccattgactgcgttgttgtatcaaccgttgttgttctgacagtcctctagctaattcaagcttggcttgttctacttttgcatccgcattccgttgctgttgttcaatcactttccaggcttcctcggctccaccaggcatagactcgcgtatcaagtcgttaagtgccttccattctccgttttttttcagttcataaattttcagttccaaagagtccaagctctgataatcggtcagtgccagctcttcagctaattccttgataacctcatctatcttatcctcattgttgatgtaatcaagataaagtttgcggatgctgtcacactccgctttcagacgtgcataatgtacatccgattcgctcaattctccaagacgcttattcagttcattgcgtagtttacgtaaagataacgactgctcttcatacttttctttcagtaactcataccgcttcttatactccatctccttttcttctggtgttatcaacgagacttccaagtcattggcagatataaatagtcgtttacctttcgatggcgaagccaacatatacttggaaccttgtggcacacgcacggctgtcagtgtataactacccgccttatccgtgaccttcaccttcaacgaaaatcgtccgtccttatcacttgctttattagcttcccccgacacaataacttgtacaccctgcaccggaatgaaaggatcggaagccgaacgggtaaccttgcggactatccccttctgggtatgaacctgtgctgtaactcccaataccatgaagacggcaaaaaggaatactgttatcaaacgtaatttactcatgtcattttcattataactatagaattatctagaatcttacctttattattcttatagtccttgctacttgcctttactattttattcattaaaagcgatggtttaataaaaccatcgcttttaactccttacaatgcctgtccacattccgaacaaaattttgcacctttgatattccgatatccgcagttcgtacagaataccataccgttaatatccaaattcagagttgtaaaagaatcccgattttttagcacctcttcagctatttcgagcgccttatcatcaagtttggactgttgtactatcccccaaatttgcgtgataagtaccggccagaagaatagcatagaaatgatagtaggaatagcttgttgaccaaagatccctatcccagcctcaaacgctattgcattatctttaggtatcaagctgactttcaatgcagacttcaaaccaagtacagctttaaataaaccgccctttgatatagaaatatcaacaccaccacttaataaattatctatttgtacctcaaactgctcggccgcaaattctgtttttatttgttcagcaataacaggaatcaaagaaggattgccctgaagtatcttttttgttgcaaatgttcccataattctattttttaaaagtgtaataactgtaatgcatgatattggctcgttgtaaataacacaccggcttcaacaagcaattctttaatttcacgctgttgctcttccgtatagttcttttccatagacttcaatatagaaaccattctttcagactgttccttgatctcctgttcagtaactataccatcttccataatcttcttgaatgtgggctggttcatgaccgcctcgtctaaattcaacattccttgttcattaaaaaacataagctattatatttaaagtttatttccacaatgtttgcaataggtccagccatccactatcggttgtttgcaattcgagcataccttgcctgatttttctgccgaaagatgatctactatagtcttatattgagaactttttccccatttcaagatttccttaacccgcacagccgagaacggatgattctgattcattattgccgctacctgcaatgtcttattccataatccgtcattacggatagcctcatattggtctgcctgtttagcccactcctccatatcgatattctttgttatagaagtcggacctccggatagacgagccatcgtgcttgccactatggccggagtagtcacaatactggcagctctgtcacaggacaactcacttttacgttcccaatacaaaatcgcatattgaagaggagctcccaaactccccaaaacgcccagcgaatccagaccatccatcacataatgagctatagaatgatacaagacatgatgacaaaggatatgcccgcattcatgggcaatcactgcatccaactcctcttcggtcatcatatcaaccaaaccggaagtgatcgttataaaaatctttgtatcgccaaaggtccatgcgttaggattaggatccatagagagataaaactccggttgctcaatacccaactttttacaaatcggtggcagacgattatacagtttcggcaattgactcggtgataaacgaattgcagatgccatattaacgccatattgcagttgttccaatcccattgacattaactttttcactagggtcgggaatccgggaatactttccaactgcctcaatgcagctgcatcctcaggatgaataaaatctgttgctttaatcatggttatcaatattaatatctattgtttttatgaccttcattacaaaacatatcaagttcagtcttttcatatcactggtatacgcaacaaactcctcgtaagcaccacaggttaaaatcctgatatacaataaaccggaaacataaaaagaattatgcgaataaattcttcatttatctgataaaataagaaagcagcacgataatcagtattagcttttaacagatacaaatatcatactgctaaaatgttgtccttgtgcagtcctttcattggcgatttcagagacctggacaaacatattctccatattctagttcaccgcatcatcattacaagtctcaaatataacgaataatatagcaggaaaaaattacaaaagccccaatcatgtctaaacagaccaaaaacagaactattgatgcgaaaaacatgtctatcatgacattttttattttgcaaatcacaacaacaaaaagatagcattcattataaatatattatttatatctttcatctttcaccgaaagtcacaaatccttttgttcatcgtactttcaaaccattgacagttctttttcaatctatcacccaatctttcatctttcaccacttatcacattcaaaggaacagctatttctttcctgaactattaatagataagttccttttcattaaatataaacttccttttcattaatagaaaacttattcctcacctgattcaaactataaatgcaagttccgtttttataaatgaaagtttcatttataaaaacggaacttgcatttatataatcaaagctttcatttatagattacaaacagccaaaagaaacttctctattagaggaaagaaactttgtatagggaagaaaggaacttttctattaatagccaatgtaagggacagtacataagaaggttccaacaaagagaagatgatatatttggagagtccgataataaagcatacctttactcgccttttaaataaagaaacataaacaataaacacatctatcatgaaacttactttgatgcgggacaacggagggacgacaaccatgcgaacgttggacataaacatacaaatagaaacgatgaagcatgaaacgaaagcccagccagtcagcaacctacgcacgagcatccgttacgcatcaccggacagcaagctggacgacgtcaagaaattggccaaagttgtcccggctgccacttttcgtaaaatagtcaatggtatacagatgaccggatataacggcatcatacaaatagaagtgaatcatcttgccaaccggatggaagtaaaccgggtgaagcaggaagcggccgaactttcacatacattcgcagcctttatgggttccggaggacattccgtgaaaatatggatacgattcacacgtcccgacaagtcacttcctcaaaaacgggaagaagcggaaatatttcaggcaaatgcctacaggaaagcggtcagcctataccagcccgccctttcctatgctatcgaactgaagaatcctgctctggaacagttctgccgacagacttatgacccggaactttattacaaccctgaatctaccgtgatttacatgcggcagccattggaaatgccttcggaaacaacttacaaggaagctgtgcaagcagaagcatctccattcaaacggttgattccgggatatgacagtttcgacacattatccgctctcttcgaagctgctttaaacaaggcatatcaatcactaagcgaattacagccaagaatccatattcattccgatgaagacctgaagcctttgctggttcaggtagcgaagaactgttttcaggcaggaataccggaagaagagacgatccgttggtccaccgcccatttctatacaaagaataaagaattcctgatccggcaaaccatacagaatgtatatacgtgcgaaaaaggtttcggaaagaaatctcccttatcagcagaacaggaactggaatttcggacggaagaattcatgcaacgccgatatgaatttcgctacaatacgatgacgacagttacggaataccgcgaacgaaacacgttttgtttctgtttccgtcccatcagtaaccgcatacggaacagcatcgcaatgaacgcacgcctggaagggcttaacctatgggacagagacgtcgtccggtatctggactccgaccgtatccctattttcaatcctattgaagatttccttttcaggctggacatccattgggacggacgtgaccggattcgggaactggcaacccgggttccttgcaacaatacccactggcctgacttgttttaccgctggtttctgaatatggtagcccactggcgtcagacagaccggaaatacgccaattgtactgtaccgttactggtcggtccgcaggcataccgaaaatccaccttttgccgaagtctgcttccacctgaattacaggcttattataccgaccgcattgatttcagcaataagcgggatgccgaactttctctaaatagattcgcactcatcaatatggatgaatttgatcagaaccgagtgagccagcaggcatttctgaaacatattcttcaaaaaccggttgtcaacgtccggcgtccgcatggcaccgctactcaagagatgcgccgatacgcatctttcattgggacaagcaatcacaaggacctactgactgatacttccggcagccgacgctacatcgtcattaacgtgaccggtcccatcgactgctcccccattgattatgagcagctttatgcacaagccatgcacgacttatatagaggagagcgatattggttcaacacggaagatgaaaatgtcatgacggagaataatcaggaatttcaggtcatgccggttgccgaacagttgtttcacgaatatttccgaggggcaaaagaaggagaagaatgcgagcaactccttgccattgaaatactgcaacaactacaacatgacagcaagattcatgtatctatctgcagtattgtccagttcggaagaatattacaaaagaacaaaataccttctttgcatacgaaacgcggtaatttctacaaagtaatacgaatcaagccgggaagaggataagtttgcaataaaaaatatccagtgaaagatgacagatcagtgacagatcattttacatctatcaccaacgtacaactaccatagacagggagtttcagcagaaggtgaaagattgaaagataaaagcataaagaaaagctttagtggagggagtatagatataagacgaaacatcgcctaacaaattttcgttctactcaaattgaaaaaatagactcatttaaatggagcctgcattcaactttagtagaacgaaaatgatcatgtagattaaataaattattaatgaaagaaccgaaaattaagtatagcgtcataacagattatcttttacgattctccgtttgacaggtttagattaaacgaatagtacttattttgcttttttctttttcttcgcgttatccttcttacgcatatcctggtatttcttatattgttcatcggtcagaatgctttttattttagcatctatttcctgccttttcttttgcatttcttcccgcgtaggtctttcattcgatttatttttcgcaggtctcatttcttccattgcagctttgaaatctttggcctgcttttcattcaagcccagatcggcaacaatctgttccatacgtttctctctatcagcctttccattctgacgattttgagccatacatacagttgagccaatcaataacgcaactgccaaacttaaaatttgctttctcatcattttaattctcatattaaataagttatgtatgttagacctcacaaatgggtgaaagttaattcgataatgaggccaaaaactgttttttcacattatttatcaaagggcagctagtatcacatcgaaaaacgaataaacgttttcttatccggtaaaaaaacagcaatatccagtttatcggtttagaaatattatttctatatttgcaggaaacagatcaaaagcttgacataacccttatgcaaacctattacaaaaccgattaataattaaggcagtaatcactaaagttacaccacgctgatttatcataacttttagttatactaatcatggataggataggagaaatattaatgatagaatgggaagatagttatggagtagaatcaggatggagagatatatctaattattctgcttctgttcttactattaaaagtgtcggtaaagtaatttatgaaaatgacaaaataatctcattagctcataatttcgcagatgaaactgataatacaccaatgcaagctaatggaatcatggtaatacccaaagcttgcattgtaaatgttacttcttgctctttttcttgtcggcagtttgagtcagagcagaagccgccaccgtcttaacctttttaggagtcttaggattccttaaaagttcagatgcaatactagccacttttggcgatgttttttcattctttcccataaacttagaattaaagattgtacaaatatagttgttatatttaggatgtccaaaaaaatgatatttttatttgcatatctcgtttattttcactatattgtagcaacatcaaagataagcgttatgaaaaagagaaggaaaagaaaaagcatcgtagatttcagagcttctttcccggacgaagaaagcgcaatcagatactacgagagtgtaagatgggcaaatggagtggtttcgccattcgatgaaacatctaaagtgtacaaatgcaagaacggtaaatataagtgcaagaataccgggaagtacttcacttataggactggtacgtttttcgctaactctaagttaggaatgagagattggttatacgctattattatgattgccaaccgtaagaacgctatatcttcataccaattagcagatgatttggatattccacaaaagacagcatggtatatgcttcacagaataagaactgcaatggctaaagaaaacaatcagaagctatctggtgacgttgagatagatgaaacatttgtaggtggaaagaatattaatcgccataaagataagaaagtagagaaatgtcaaggacgtagctacaaggataaagttcctgtattcggaatacttgaaagaggtgggaatctttttgctaaggttgttcctaacacccaagcaaagacgctcgtcccgattgtgaaaaagaatgttgatgtaggaagttcagtttataccgatggttggagctacaaaggactagagaagaaatacacgcaaatgtctgtagaccacggcaaacatttctacggaatgatcctagttactgatgatggagagataatcgaaatcacaactaacagaatagaaaacgcttggtcggtatttaaacgaactataaaaggaacatatatccatgtcagcaagaagtatctacaaagatacgttgacgaatttgttttcagatttaacacccgaaaaattagcaaatatgagagaattgaattacttttgcaatatgcagcagcttagatattatggcaaataataaagacataaagaagaacaagcctaagaaggagaagaaaaaaagaaagcctatctacgagatacagggcttcgtcctcactatacccgaagaaaggctaaaggagatgctgctagaaatgagcaagccaaatcctgaaaaataaaaaaaagaagatactatatgttatagtatcttcatataatcaagttttaatctatctctaaaaagtatcttcctgtaaatgttaagtaaattttataatcctataagtttatattcatcaaacgatatttaatcatgccacaaagatatatattatttttgaaaaaacaaatgaatcctatacttttaaccattcgtcatcaggttttgctattaatctagcattattaatagccatatctaaagtcaaacatgttgaagctctataaacaccattttccttttcaattactaatgccaaatcagcagcagctttatttgtcaggcaaataggaagaagcaattgaatacgtccatcataatattgcggaactgctgttttataattcctgcgtattcttctgatagcatcattaatagtaccttgtaataatacgcctaattgatacctatccatctcttgtaatgatttagggaatcttgctatattgtcatctataatatgattaacattagttcttaattccaatttagtatcataaatcaaatccgaagaattttcaaaataattcgcattatcaggaagattagtgaatttcatcaaatccctatcactggattttcgccatccgataaaataccatttaaaagaaccgggctttctgtttacttgaaataaaccatatatctcttcttgataatctgtaactaatcctgtattaaagacagagtaattattttgttctaaaacttttttctcttcatatacttttataaaagtatgttttatataattttctaagattggattttttcctgttggctttttcttataatcccaatcttctcccattgccaattctttaagttcttcgatacaagtctgtatatctttaaaccatgcgtattctaatagtttcatgccatatttttttgcaaagttaatatttaagttgtaaactacaaagttttatatatctttgcaacgaaaagagaaaattggagataaatccaattttttgcaggaaatagttatagcctaatcgtcatcagaatcaccacctcggataacagaactaaggctatcagtgaacttactcgttgggtaaagtgtacttcgtcatatactgacgtggtgcgctgccattgagtaagtgggcttgtggtgagccttgatgacgtatggcagtagcactacgtctttttttgtgactttgcgtatggttattgctgaattggatagggatttattcactttatgtttaactataaaaagaaaaagttatgaaaaagtttctaagtatgacgctgttgtttacagctatgtttttaacgttctctgcgtgttcaagcgatgatgatgaaactacttacaccttagtttacaatgctagcacttggggaaattatgccgaaactgtcaggatattcgagtgtactgacaatggtgacaaaatcttcaatagtagtgtagaatgtaaaaaaggctatgaggaaaccttcactgcacaacctaatgtatctaaagtgaagattactattggaagcaaatgggttcagcaggtatttcttcttaaaaaaggaggaaatactacaattacaatagatggcagtactgttgtaggacctaatgaaccataattattacacttatgttattctacatctgtttaataatatgggctgcctgctttatatttggcggtctaacaggaaagaaataatagttgtatatgtgcaaataatttgctatcttagcaaccaattaataccggaggaaaatcctccggtataacttttagttataataaacaatgcagtgtaactttagtgattactgccataattaaaacgatgagaacacttttctttattctgccatttatctttatcactacaggatgtattaaacagaatacagaaaaaagtgatattttgacaaaagaggatatagccaaatttgacagtttatttaatgcctgggaaaaagaaatacacaacaatcccaaagcacaattaagttcaagtacccgtgcttacaccattttaccccaattcaaagagctaaaagctatgggtaagaaaattatcccatgtatcatagaacagtttgaaaaggacaataacacttttttcgctttacctctttatgacgaattacaagataatgacagcctaaaatctcacagagaaacaagcgaacaagataaagtgagcgagattgtgcagaaattcagagaacaggaaaaaagaaagatgtgggaagaagctaatagctacaagacgtctataaccgacactactttcctgaagacaagagggacgatgtcgtatgctgcaatagatttattcacgggacgaggtttcaataaagattacgcatttaatcaggttgtctatttgaaagccttacaaagagcccagaaacatctgtctgtcgtaaatggtcagttggcatgcgacttaaagtcaggtacagaaatatatatttccgaagatttatacctatttatcaccgacctttttaaggattggaatacgtggctggaatcgggaaaatatgagataataaaagacgagcaagggctttatacagtgttacctaagaaaaccaaccagtcatcgcaaacgaactccgtcacattgcgacctattccccgtgacattccggctggagaggacataagtcccgcttcgctttctatagaaacagaacacgatcattatccgctatcaactacagaagtaaaaataaccatcaccaaccactctcactatgaatatgagtgcgaatttcggtatgaccaacgagttacgaggagtagaaaagaaaagaggttgtgtcaaaacgctgacacagcctttttttatgcgcaaagcccagactttctcaagcccgggctttgttattacccaaagttttcgtatctttaggtataaagtttttcgttatggcaaagttacattttcgtccttacattcccaaccaaaccgttctttttccacaaagaattgatgaaaacatagctgcgaccgacccggtccgcatcgtgaatgctgttattgacaatctcaatcttgagagtttcaagaagctttataaggaaacgggccgttgtccttatcatcctaaaatgatgcttaaggtgataatctacgcctacatgaataatatctattcttgccgtaaaatagagaagcacctccttcgtgacattcattatatttggcttgccggtaatgagcatccggattttatcacgatcaaccgttttcgtaaccgtgtaaaggaggaaataaataatgtatttacccagttggttcttgtccttgccgataaaggtttcatcagccttgatgtggagtatatcgacggcaccaagattgaatccaaagccaacaaatatacttttgtctggcgcaagacagtcgaacggaaccgtacgagactaatggataaaatccgtattctcttggaacaggtggatgaagccattgcacaggagaactctataaaagacacatccgtggagtttactccctgcaggctctctgacatagtggatgaacttaaagaagccctggaacgccagcctgcaacaaaggataaggaagaaaagaaagccctgcgcaaaaagaagaagcaggtcatggaacttgaagggtatcgtgacaagctgatagaatacgacaatcaccttgatacccttggagaacgtaactcctattccaagaccgatcctggtgccacattcatgcgcatgaaagaagatgccatgaagaacgggcagaccaaacccggatataatctgcaaataggtactgaaaaccaattcatcacagacttccgtctgtttcccaaccctaccgatacactgaccctcataccttttttccactctttccagtaccgctataaccgtttaccgaatatctgtgtggcagactccggttacggttcggaagaaaattaccggttcatgcaggagaatgggatagaagccttcatcaagtacaattacttccataaagaacagcgtcctcgttatactcccaacccattccatgccgaaagtctccattacaatgcccaagaggattattacgtttgtcctatgggacagcacatgaaccgtataggaaccaaacgtgacaagacagcgagcggatacatcatcgaaagtgcccggtataaagcaaaaagatgcgaaggttgccctttgcgtggcagttgttttaaagcttgggggaaccgtattatagaagtcaaccaccgattaaatcaatacaaacggcaggcacgggaaaggttgctctcagaagaaggtatcaagcatagaggcaggaggtgtatagaaccagaggctgtgtttggacaaatgaaatacaacatggcatacagaagattccggcatgtgggagaagacaaggttacaatggactttgctttctttgctatagcctttaatatcaaaaaaatgtgtgctaaactgataaaagaaggaaaggggctcattacagttgccaaatatatgtttatgggactatttataacccgatataattggaatatagcaacttgttgccaaatgcatgaggaaaaagcagcatagccaaaagaaaatatagcagaactgtaaaatataaaagaggttgtgccaacgttttgacacaacctcttcagtacccagacccggtacaagccatagaaatcataggaaaataaaagaacatatcttctttattatcaatcacttgtatatttcctattttctctatttttgccatattttgcccattttccgttattcagtacacttttagtacactttgaaatatcattttcttttgtacctttgcaatatcggaaaacaaaagaaaatcaactatttagcgtaatcacccggttatggtacctaaatcgggataaaacctctaaacaatggcaaagttagaaaataaaacgaaagaaaaccccaagttagaacaaaataagctctcggatggtagaattagcctttacttagagtattatttaggtagagaggaaaagcccgtattagataaaaacggcaatcaagtgtactatgatagtggaaagatgcaaggtaagcccaagtttgcagtaaagcacaacaggcgaaaagaaaaccttagtctgtatctgatagataagccccgtacccctgcagaacgtcagcagaacaaagaaacgttggagcttgctacaaagatacgtgcggagcgtgaacaggagtttaaagaaagtatgttgggctatcggttaaaaaaagatagaacggtcaatttcttagactatttccaagcctatatcaacagttataccaagaaagatattcgcatggtacaaattgcacttagccgttttaaggacttcttaaaagagcaataccccatgaatgagtttagtatcaaaccggaacttatcaccaaagaaatgatggagcagtttgtagcctacctgcaatcccgaagtgtaggtgaaggggctaaaagcatttaccagcgtttcaagaaagttattcgatatgcgattgaccacgatgtaatgttgaaagacccatgcaaaagtgttacctgcaaagtggatagccaaatgcttcggaaagatgttctttctcccgaagaaatacaaaagttggcggcttgccattatgacaacgagaacccgaatgtcagacgtgcttttatcttctgcttatactgcggtctgcgtttctgtgatgtaaaagaccttacctataagaatgtggattacgctaatcggttattgaaatttgagcaaagtaagacaaagggacattctgccagtagtggtgtagttattcccctgaatgatggtctattgtctatcattggtgaagccccggcagataaaaactgcttgatattcgatttacctacttacgaaagctgctgtaaatcagtaaaacgttgggtaaagagagccggaatagacaaacatataagctggcattgtgcccgacattcgtttgccgtgaacattctgaacaatggggcaaatatcaaaaccgtagccagccttttagggcatagcggattgaagcatacggagaaatacacccgtgcggtggataaattgaaagaggaagcaataaacagcttgcccgaactaaagttttaaccataaaagacttatctttgtaactatgaactttgaagcattagtaaaacatatcagcacgatacagaacacgttgcaggcacaagccgcacacgctgtaaaccttgcccttacttcccgtaactggcttatggggtgctatatcgtggagtttgagcagaacggagaagaccgtgccgcctacggtgaacaattgttgaaaaaactggaacaacgactgaaaacaaaaggtctgaacgaacgtagattccgtgaatttaggcggctgtacctcgtttatccacaactaaaagaacctgttacacaatacattgcatcacaaattcaaattcggcagtcattgaccgccgaattcactgaaccaattcggcggttggtgaccgccgaatctgaaaatggcgtttggaaactatcaacagaatacccacaaaccgaaacgtggatgattccggctgatagattattcaacagattatcttccacccatttaaataccatatcgggaattgagaacccggtaaaacgtgctttctatgaaatggaaaccatgcgtggctgctggtctgtaaaggagttagagcgacaaatcgcatctttatattacgaacgtagcggactatccaaaaacaaagaagccctctccgctttagtccagcaacaagcaaccttattacaacctaaagatgttatcaatacccctgttactttggagttcttagggttgaatgaacgtgcattagtgacggaaaacgatttggaacaatccattcttgacaacttgcaacgcttcctattggaaatgggacatggcttctgctttgaagcccggcaaaaacgcatcttgattgatgaagattatttctttgccgaccttgtgttctatcatcgtattttgaaatgtcatgttattgtagaattgaagatagacaagttccaccatgagtatgcttcgcaactaaatatgtatctgaactatttcaaagcggaagtgatgcagccggatgataatccacctatcggtattctgctttgcactgaaaagggagatacattagtaaagtatgccactgccggattagacccaaatatctttgtacagaagtataggatagaacttccaacagaagaagaaataaaagagttcatttcttcctcaaactatgagagttacaaactttaaaattggcgaaaagaaaaggttatttcttctttcgaaactctgccttgcgaagtttcacggaaacacgggtgtgggatagagatttcttcataaggatgcttatttatagagattgtctattccctttttgggcacatatacgaaattgccgatttgccgagtaggaattgaaaactttctgatttgaagatagagtgtactgtcattcatgtgatatttctcacacgcttgctgtatcgtgtagcaatcctttggttccaaactatacagcttgggaatgggcttggactgctttttaagcagactcttccttagagggtacatctccataagcgtttctttgcttacccgtgtttggcgttgccctacattaacacttggaataacgccctttcggatttggcgataaagggtttccttactgatgccaaacaaagaataggcttcgggaactgttatgtactcctggtcattgggaatagctttggctatagcatccaaacgttcatttcttttctcttcatctttcctgcgcttaaatgcaactttagaacatcttggtgagcaataccaagacgtgatagtctttgcgacgaatggctcaccgcaaatcttgcatttccttgttatctcaaactttgctgcacccatacaattctactttattattacttatgcttgttaagtgtcacattatctaccaataagtgttggtacaattatggcacaataatacagctaatatccgaatataacaaaagaaatacaaagtttaactaaaaagaaaatccgcataactcattgagctatgcggatttatctatctatacctttcggtagttatctatacctacttaactttgtatcatttaattcgtagaagtatagtcctacgaattaaatgatacaaagtcgctattttattcgaaagaatgataacctatacttcccaaagagagtatagcgtacaaaattaaacaggacctaagaagctttcggtacaagtgaaatagcaaaacctccaccagatgcagtgctaattttcaacgttgttttattagtgacagtctttgtctcaatcacataatctgtgggattattacgataatgagccttcttaccatcacgataaatcgtagcaatatacttttgccctgtaggaagaaatgaaaaatcaattgtcgcaatacgaggaacttcaccgttagtaccacctacaaaccaattgtcagtattctttgcacatcgagctacagttatatattccattggttcagcttcaaggtaataacttttatcccaatcaagggccacatctttaataaactgaaaagcgtcgagatatttctcataagtttccggaagatcggcagccatctgaagcggacttgacattgtgacatataacgagagctggtgggcaagtgtagtattcacccacgattttttatcagaattatattttgttatatcattctcaaacaaccccggagtataatccatcggaccaccaataagacgggtaaatggtagtatcgttgtatggctcggcttacttcctccaaaagcctgatactcagatccacgtgcagactcattactaataaggttgggccatgttcggcaaagaccagtaggacgtactgcctcatgagcatttaccataatcttgtaatcagcagccttttcaacagcatactgataatgattaaccattcgctgagtataatgatgttcacctttgggtattatatcaccaacataaccacttttaacagccttatatccattatccaccataaactgatatgcttgatccatacgacgttcataattgcgtacagcaccagatgtttcgtgatgcataatcatctttatgcctctggacttggcataatcccgtatttcaggcaaattaaaatcaggatagggggtaacaaaatcaaatacatcttccttaaaattaccaaaccaatcttcccaaccgatattccatccctcaactagcacggcgtcaaaaccatgttccgctgcaaaatctatatatcgtttcactttctttgtagtagccccatgacgtccatgaggcttagcatgggtataatctgtttttccaagatgaatattaggaaaatcccatgtatagctccaatcgcttttcccagtaatcatctcccaccaaacaccaatatacttggtaggaaatatccatgaagtgtccttgagtttacatggttcattaagattgagcgtgatacgggaggcgagaatgtcacgggcatcatcggagacaatgatggtgcgccaaggtgtatagcaggcactttgcatatatgccatctccccattgacatcgggcgtaagccatgacttaaatacataatttttatcatcaagattgaggtgcatagccggataattaactaaagcagcttcatgaagattaatatataaaccatcatcggtctttaacatcaatgaagtttgtactccagtaggcgaaaaagacgtctgtgacaagttgtcagaaatcgatttttccattaatccacgtatttccgaaagccgactacgtgtgtaatcatattcctgtgtatcataatctcctggaatccaataggccgtcatatcacccgacatagcaaactccgtgcactcgtctgtgataacaaaataacttaattcgcgctgctgtgggaactcatatcgaaaaccgagtccatcattaaaaagtctaaaacgtatagacattagacgattggtatccgcttgcctgagatctactagcacttcattgtaatgattacgtatgaccgattcttctccccatacaggttgccacgtttcattcaacgaatcatttgttacagcagtcattttaaacttttcaaataattggtctgagttttttagcataaatccaagtccacttggctttataacagttttccccttataatacaacgcataagtcggacgcccttctgaagataaagaaaaattcattttcagattgccgtcaggcgatgaaaatagctgttcggcaaaagctgaggttgtacatgccaagcaaaatgccaaacttaaagatttaaatagttgagttatcataaatgtcaaaataatacaaagattatattttaaataattttgcaacagcaccaccgccacgagcaacaggaattgaaagcgtcgtattagcagttacttcacgagtttcaatctctaccggataaggattcctttcccaatcagcatcacatccatcgcgataaataatagccttatatttactgttagcatctagaaaagaaagactgatattagctatacgggcttctgcaccagtagcagtagccaaataccaagaatcatgacctttacttttacgggcaacagttatatatttcccaatctcagcttccggataagtcgttttatcccaatcggtaggacaatcacaaacaaattgaaatggaccaggattattctcgtaattttcaatcatatcagcagccatttgaagcggcgaatagagaatcacaaacagtgccagttgcttggcaagtgttgtattgggatgtgtctgtggcattgcgtcattctcaaaattgaatataaccggagtaaaatccatagggccagccaatccccgggtgaatggtaaagtcactgtatgttccggcggattaccaccttcttcattccatgcattccattcttgtccgcgtactccttcttgagtcattaagttcggccaagtacgttgtaaccctgtgggaatgacaggctcatgattgtcgatggcaatctgatatttggcggcagtctcaatcaccttacggtaatgtctcaccccaaactgactactatggtattctttattatctagcaaatctccaacataaccggttttgacatagtgcattccattttgccgataaagtttaaatgcatcttccatctgcctttcataattagcaattcgcccacccgtttcatgatggccaataagtgcaactcctttactacgtccataattattaatatgtgtaatgtcaaaatccttatacggatgtacataatcaaaattccatgacttccaatctggattccaaccttccaccaatactccaccaaaattatttttagcagcgaaatccatataacgaatagtattttctgttgtagctccatgctgtggtccatcataccatgtgtgagttttcatgtggtaacaccaccaaacaccaagatagcgttgcggctttatccacgaagtatccattatccgacaaggttcattcaaattaagcatgagacgtgaaagcatcatgttactggcattgtcagcgattatcagtgtacgccatggacttacccgtacaccagtaacaaataccttttcaccactactccatggtgtaagcgcagcacgaagtacattacttcccggtgtagctcgtacattcatagcagcgaaatctgtcaaattagcttcatgaagtgctatatgcaatcctttgtcagtacgtatggtgaccggagtactcgcccatcctatcttatctatagggagttcacgaaatagaccttcgtaaaaacgtatcccttctactggaagtgaccaactcgtatggttatctgcaaaagtaaattcggtaagttcatccatgattacaaagtcacccaattgtgcttgacgcggaaattcataacgaaatccgacaccatcattaaatacgcgaaatacaacactaatctcacgacctggagctattttcttctgcacgagatcaagcgccatctcattatagttattttcaattaccgattcttcaccccataccggattccacgattccgaaacagtattacgccgaatactagcaactgaaaatccggtaatcatgtcaggaacgtcttttagcttcaagcccaatctcgattgcgacaacactacttctccgccacgaacaatccgataaaagatctccccttttttagaaacctcgaacgtcactattatatgcccatccggggatgctatatgatgggtattactacccatcatcaacatgctcgaacataatacaaagaagcaactaataaaaattttatgtatcatttcaattcaatataatcaataaagaacataccattaccactacccttacagatatcaacatcattcacgccttggttaagtcttacagttacagtctgatctttccaaacatattgttcatcaaaagaaatctgcttctcatctccgtttaccttaaaaacaccagcacccggaatatcagaggaagcacgtcctcgcacaataactgtataatcgccagtcacaggtacctcaacagcaaagagcacagaagcgccttcacccgtaaaattacccacataaccaaacccgtcagagttctccgctatcggcggtaaatccgcatcgtctattgtccaatcgtttttgcaagacatcagtcctactgttatcgctataaaaaaggaaaatataatctttttcatttcagtcatttcttacaaattaataatcggttgttacttttgaacttttacactgccacgtagagcagcaacttcagcctgataacgtttgcatgaagatgtgatacgaagaatacgacatccatgtgcaggtatgttaactttataagcaccttcaaaagcacctaaatcagaatgagtccaaagatcacgtatattactaacttttccttctttaatacctaaatcacgcaaaaagttaatagacatatttgaagcttcttcctctctgttgaacaatccaacaatccactcaccattaggcaattgccccacccatttcgagcttgcaatttctgatggattacccgacattggacgtgcactaaatcccattttattaagtgccagaatttcctcgttttgataaaaacgctcacacccattagctgtatcatactgatcggcaatagctatgggcgaaccggttatagccattagtgatacccaaaactgacgttctgtatcactttcacaagtatttaacctaataaagtcgccatccatcatgatttgcccacgggcggctacatcactaaatccaacaaaaccatcaaaagcattgccccactgtgcccaacggtcttgttgaatgccacgacgacgattactgataaaatcccatcccccaccgaaaacatcctcactaatacgaaaaagatcaccgtatggaatttcgttagcggcatgatcgaaacaattgggcattaccaaagagataaaaatttcatcacccgcttcttccttaatccaacgaagagccttcacataacgttctgtaccataagcatcttcgtaatagttcagaaaatctattctaagaaatgagaatccaagatcaataaaataacgtacataccctttaatccactgttcagcaccctccttatctgtatctacccaataaagataatcattaaaattaacatttcccttgatatcacgagtggtctttgtagagcctttcactggtaaattgttctcataagcttttctcgacatccacaacggatcgtaataaatccctgttttcaaacctttcttcttgttataatcgatccaataggcaaaatcatgactccaagcgtcattatacttcgttatatatccattttcatttacagtttgtgctctttcaatccaaccatcagtgcataccatatcataaccgtaagagagaaaattcttggctacccaatctaccgatttttgataacgatcctcggccaatgggctatcagttacaaaacactgttcgtaggccatccaataaagaggaccagcgccatgtctcgtaaatctactatcacgagcactgactactactgaaacaaaaacaagtccacacaaaaatatacttctaatattcatatcattttgatttaatagtttattactataattacaaatttactctatcttgaacacgtaaagtgtcattccctcgacatcgacttcgattcgatattttccactgttttctagagaaataccccatgacgcagccaacggattaccaggtccctgaactttcttcatcctataaatgccactgtcttctactaactcacgatatccatcactatcgcctttttctggtataaggaaaaccacttgatcccaatttcctttagatgtaatgaaattgaattgacgatttccttctgcctcagtataataaagttcaccttcccaactaaaacgtttggatgcctcatcatatatcaattgtactcccggatcatttgaatcagtaccagaattacccgcaaccccctgtatatacaattcgttaatctctggtttgtcaagatcgcgaaccttttctaacgtaactgttaaggattcaacatccactataattttgtatacggcactaccttcttccggtattccgaaaaatgcatcttttagtgtaccttcaccttgtgagcaacgttgcaacctataggttccaggctgtatgacttcgatatacccgtcagcagtagcattttccggaacaagaaaatcaacttggtcccattcacctttttctgtacaaaatttgaactgcttattttctgtattataatggatttctccctcccaagtgaagatattcccatcggacgaatccatatatagcccatcaggtgaattccatttgccagatgcatttccaagcatataaagttctggtcctaattcaatttcactaagccaagtcgcagtaatagtaatgttctttttacccttcgaagcgtctactataattctataattgccgggggtctcaatgttccatttgctatcaggattaccggtaggcacatactccacagctacgtcagcaacacccgatttatttatgactgttcccgctacaacaggcataagaaactcatcttcatattttccattattattaatagggcatttcatctccccctgtctaagcgctccttcatactgaaacacatttggtgaaatattttccattggatagggattattaatatcccaaccagccggggtagcatctccaataataaaaagttgatttagttcaaactctttttcatcaagtttctttactaatacaacagttaccgtcatatctttcacattaatagtgatatcgtaaataccatcttctccttcatgaataccccaaaaatggtcttcaagatctccggtcagttctgaacaaagacgtgcattattaggtgcattctctccaaatgtagtataagcataagattttccacccaccacgcctgaggaagggatgatataataaattttatcccaatcacctcgtgcagtacaaaatttaaattgtttattgtcaccgtaataacgcaattctatttgacaagtaaatatattcggattagatgttttttccatcggaacagccaaattagaatcaaaattgttttctgccccataaccaagaatataaatctgttcatagagtgaagcatcacccgtttcaacaacctttagttccttttctgcatcacagctattcagcaacactgtgaagaagaatcccactatcaataataggtaattatatattgtcttcatcttttgtttcattgtttaaaagttcaaataagtttgcggcatcaatagccaggattttgtttaagattatggtttgtatccaatgatttacgcggaatggggaaaatctttgtatgatcatcttcatcgggcgtcttatcccaccatgaacctgtattgaatttcccgaaacgaatcaaatcgacacgacgacgtccttcaccaagaaactcgcgtccccactcatccaagagttcctgttcatcaagtgcaacacctccttccggaacataaagataatcactccatctctcttgtggataattgcgtttacgcacggaattgagtaaaattccagctttcgacaattcccccaaacgaaaacgacactctgctaaagcatatatgatttccggaaggcgtatttccacaaaatccgattccatttgaccggattcatcatcactatagaatggatactttacataatgccatccggactgatggtctcctgaacggagattactagttttgtttataggccattgattaggacgtagtcccttaaattgtccgacagcatcacgaatatacaattcataactaccatcaggggaggtcatattccccctcaccccatcttttacaacaggaatagaaccaaacaggaacaacccctcacgtttgttgttaccaagatttttgtaaagtttcaatctgacatcttcaggataattacgaaatttctgagcagtattaccgagtgtataactgtaaagtttaccattcagatcatagcttggagtaagggcatatttgcagttatgatcaccaccttcgcttttggaatcattaacgtaatattccatctgttgtgggacgctccaccaaaacgtatcacctttgtaaagccaaaaagtataattctgactactgggaaaagcgaagagaacctcatcagaaatatcattattccagtcaaatacttcatcccaacggtctgctacctgatagggtccatattctccatcaactattttctgggcatacgtaatgcactctgtccaacgtgcttctccaatatatacttcagcattcagatataagcgtaccaataatgccgcaactccagcttgggtccattgcccttgttcgttaccgttgccaccaagccccgatttagcattgattagatggaggatttcttttagttcatcttctataaaagtaaacagcttttgggaagagacttgttcgccagatccacttttaggatcagaagaagtatagagaggaacatttcggaacttatcaagtaaacgcagatacagccaagctcgaagagcacgattctgagctttcagattactgaattcctgctcggaaaagccaaaatcagcaggatccaatctactaagatcatctattatgtaattactttgcataatacctgtgtagcaaccatcccattccatatcaagatatttactttcaggagttaactcatggtattgaagagcccgccattgtccagcatcatcccaccacccatcacgtgtacaggtcattatttggtctgccgttagttcgttaagaggaatatttgattgaatagaccaataagcatgttcaaaggggcgaagagctgctcgtataacatctgtcttagtgttatagtaattatcactcataacatcactatatacagtctcactcaaatccgtgcatccagttgtaatgacagtgaaaacgaatccgcctataatggccaatattttagatttcatgattttaaaattttataagtttagaaatcaagttgtacgccaagaataaactgacggcaactcggataatatgtacgtgaaccagtagctcccggtgtcaatccattagtttgtatagaagaagggtctaccccactgtaacgggtaaaagttgcaagattctttgctgtaaacgaaaatttgacagattctagaaaatgagatttaacgggccatgtataccctaacgaaagcatatcaagtttcacataatctcctttttccaaataataatcagtcaccacatttttaccttttatttctgcattttttgtatatgctttttgcaagacatttcctgtaaaactctgagtaccatagtagaaatcatgtacattgaaaatatcataaccaaatgcaccacgaaagaaaatggaaagatcccaattgcgccaatgaaaattgtgtgtcatcgatgcggtaaactttggaagtccattaccaacaatttgcttgtcatcatttgttccgttagcagcaggttttatattaccttcccggtcataaatcataaaattaccgtttttatcaataccagcatatttccacatataaaaattaccgatacgttcaccagcagaaatacgttgtaaggtatagagcggatatggatcagaagtttcaaccatatcataataatcctgtcccacataatcggaattactgaaattaacaaacttgttgtccatagtagccccaacaaaatcgatagagtagtcaaaatctttcaactgtatcgcagtaaaatgaaggtcaaactcaaatcccgaatttttcatcgttccaacattgacaaaagttgtagaatgcaaatagggtggaacaggaacattatagtctcccaaaagatcctgctgtttacgattataataattgaaagaaccggaaatacgattgtttaatagcgaaaaatcgatgccaatattccagttttttgccttttcccaatgcaagtcattattcacatttttacctggtccccacacttgtaaccactgtccgttataatagtaataaccaaaccctgacatagtactgagtgacctgtagttgccgaaatcctgattaccggtttcaccgtaatcaccacgaattttcaaatcattaatccaactaatatcctgcataaatgactcctccgatatacgccatccggcagaaacagcagggaagttcccccacttatgatctttaccaaattttgaagaaccttcatgccgtagtgaagcagttagcaagtagcggcttttccagtcatagctgacacgaccaaagaaagctatcaacttggaatcttcagcccatgaacccactcccacatggccttcttccttatcccaatcgccagtaccgagattattagaaccaataccgtcatttataaaatctttgttctcaccagagagattctgatcttttgtatactgataagaataaccaaccatggcttttacattatgcccgcaaaatgaaccattgtaattagtaagccattccagaatacgttgagactgctttgcatatttgcgcgatccttcaccagaatatccttgggcgatagctagtgtagaagtagaaggacgaaaccaagaatcgaaattcgatgattcgtgtccagcaaacgtaatctgtgtatttaaaatctgcccattctcagaatctttccataataaaggtaataagttaagtttggcagtagcatcatagtctaaaagtttcgtttccgaagtattatcttcaaggttaatcaactcaacaggattgtatccagcagcctgaccagtaattgcagtatattgacctggattgtctacatccataataggagtcgtgggattaatctccaacgtattgcgaaatacatcccaagatgagtttttacgtttaataagccttggagctacattagctgtaaaagtgaatagtccgtttcgtgtcgtctgctgtatgcctgctcttccaccatattcctcccgtgacgagtacaaatccactccctcagctttacgataatctatcgatacacggtaattgtttttattgtttccgccactaagcgataatgtatgctgatgcatccaacccgttctcgtcacagcatctaaccaatcatcatttccaccaagatcattaccataaccacccggaatacgcaatgcgcgatattgtttggcagtaagcatatccaattcatgatttgcaacacttgctgaaaccgttcccatataagaagtatgtatctgcccgtcacgcgttccttttttggttgtcacaagaatcaccccgttagaaccacgtgttccataaatagctgctgctgcaccatctttaagtatgtcaaaactggcaatatcgttgggattgatgttcgttagatttccaccgggaatcccatcaatcacaattaacggaccggttcccgcacttctcgacgatacgccacgaatctggatactagcctgattattaggatcggctgcaccggtattagtaattgatacactgggtactttaccttgaatcatcatagatacatcaagagaggtagacttcaaaaaatctttctcattgatatgagaaattgaagaagtcaattctttcttatccatggtaccataaccgattaccacaacttcattaagctgttcactattctgtaataacttgatagtgagcctcttcattccattaactgagatagtctgatttttataaccgagataactgacttccaatactgcttcaggcaaaatcccagtaaaagaaaagttgccatcgacatccgtagtgcaaccttttgaggctaccccttttagtctgacagttgctccaatgagcggctcatcggtttccgcatccacaactgtccccgaaacattgattgcctgagcaaacaacatagttgtccaaccagacataactaacaatgttaataacacaaatcttgatagtaagtttttcatggatatgatattaaattaattgagattaaaattctatcacaaaaatagaatgcaattatacaagataaaaatacaaaactgataattaagaaaaacaaaatggataataagatgataatcaacttattacccattttacagatatgaaataattaaggtcaaataaagattttctcaaatgctataatctgattttatcccttatactttgggaattgccataatgtaatcatcaaattcctctttagggacaagtgctttagctttggttttggctttatatacatatatcgtattggtagacagatttaaatatttagccacatccgtcggattactaatgccaacacgcatcagggcaaaaattcttatttcagtggacaattctccagaactatcgatgctgacctgatattcttttggaaataacttgttgtattcatcaacgaagttaggaaacaatttcataaaagctttatcaaaagctgaaaacagccgctgccattcctttttaacccccatatcatacaacaaatattttacttcatcatatttcttatcattcaacttacgtatggcggtattactcatctcagcaacctcgtttacatattgattggctttgatagattcaataatgtaacggtccttgatttcattcacttctttcagtttcaagttcagctcagaaagctgttcatttgatttatcgagttcttcagttttactacgaatagctgcattcgactcacacaaacttctattacgtcttctaattttagcatacattaaaaacagaagaagaagcaacagcccaaataatgaaatggcatatattaacatggtctttgtattacgaagccatacataacgtgcattttctattgatggaagtacagaattaacctcaatctgacgaattcgtgaattataggttttggcatcatcaagagctaaatgaatatatcgacttgctcgactaaggtcaccgcgttgctgcattaatatagcaaggtctttagcagctgtattttctctagttaacgagcgaatatcataaattactgcaagggcagcaaaatatattgcagaatctacttgctccacacctttatatgtattactcaatatagaatagttgattgctttttcatgatcgttcaaatggtgaaccctaagtagtcggatgcgctcatcaatagattctctcggtagatacttccacatcacctttttctcaatagctgcataatcatgctcatagctgccaacaggagtcagggacaagatactatcataacacgtttcccttgaatgagcataacgaagccccaatttagattcacgacctacatacgactccaaattttgaaacatacgtgcttttaaggtataatagtgtggcagaaccgctttgggaatagcagtaactttaatcaacttatccacttcagcggcttccttaaagaaacccaccgaagtgtaacagtcgaggagagccacatgcgctagaacgagctctgactgattgttgttttcaatagcgatatcatacatcttgtcagcataggcatacactgaatcaaattgataatttcgatattcgctatacagaatactacataaatcaaaacgggattctccagtaggtaggttagccaatttgtttttaagcagaatcaactgcttttcctttgccacaatgtaactgtgacgattgtctatttcagtatcaagtgcagataataccgaatctatttgcatggacgttactgcggcaaccggcataataacaaagctaaacaccatactcagtaaaacagacctgataacttgacaatacagtgaatataaaattgaatatgcatccatatagatagttttttcgtggaaatggttaacacattaataaaagaatactgcaaaattatacaatttcggatatatacaccaattatagaacagcattttgtaaaaaacgccaagcattgttttggaacataacaagcattgttacgccttataaggatatattctcaaataggtaggtatcttctcaatcgcatagcgtaaagttgtttgtgacatagcattcttatagtgtacgacgaaatcaaaaacttcatcccaatgtgattcactcactactttaagcatccaaccgcaatcttttcacaccatctcatcttgatcgcacagcatagctgtagtaatctcaagtatatcttcaaaacacaaaccctttcgagcagggataatcagagttactgcaacatcttgatgtacccaacaattatccgattttatccatgcttccagataaaatacataccgagaaatctttcggttcataacacttttttaatgaataggcacacgccactacaacttctcagttatccaactgccataactgttcacactgttcgaatatctctgttttcgatttaacacaaaccttcttataaaattcgagactatccaataaattgtataaataaaaaaaactaaatcttggagttttctatcacacaaaattgtggacaatgacgtatataaaaagagaatagctataaatcattgatttatagctattctctttttatatacgtttacttatcgattttacttcacttcctcaaaatcaacaacattagaggcatcaatcaatttattcattaaatttacccatgtaatattagcattactgtgcgcaaactttccttgcacatacgcattttgaaattctttcaacagcgtgtcataataagataaactaatataaaatgtacaactattatcatccgagtaattggattttgaataaatatctcccttttgaggtctggaaaatattctttttgaaaaagcttgaaacaacatagccaattcttgtccattaaaaacttgttttttcttcgtttccataatattattttttaagatgaaaaaagcgtggaacatcccctacgcttctgagactttggcgagcctgtactgcaaataaggaaagcccacgctatagcgcaggcgttcacttaaattcattgcagtacttaaaatcgccaaatttcagaagcaagaataaaagctaacgctttaatatatacatttatagacttcaataaatcaaagtccatgcaaaaataacaattttcagatttaaattcgcaaaaaatatttttttgttcttttcaacatcaatattttatctaagtcaaactaatttagataagccgaagttatgaatacggttcataacttcagctttactccgcttatagtttacccagtttatcggcttcttttctcaattgttcggcttgctcgttcaacagccttgcacgttccagtgcttccgcctgcttttggatgcggtattcaaaatccatcactgaatcggtcagccttcggataaaaccattatcccgttgccacttgaacttgttttccagcatatcaaaagtttctccgtctgcctgtccttgcatcaacaaatagcggtatttcatatcgttgtcctgcaactgctgcatacgttcagccaaacgaacattcaagaatatggaaacgaaacagataaccagcactgccgaaaaaagaaacaatcccggacaaatccaagaagctaccttgttgtaaatccgttgatagagcggtaagggcgtagcttcctctttatccgtcttgcaagagcccaaaacatcaatcattaccttgaaacaacggtaggtttccaatactattttcttggtgtcctcgatatgtttctgctgaccttgcatcctgttccttatctcgtcaagctggctttggatagcctgcaaatccttttcgggaacagccgggttactgtgcagttccgacaatgcctgttcgattgcgttcagtctttcgagagtttccccccgactggctggcgttacctgtgcttcctgcttctctttcagttctgtaaccattgagagaagcccctctaaaatcaaattttcctccatacgcttataactttagttgttttttcttttttttcttcttctttctcaaaaaggaatcatcgggcatttcatcagccggggctgacaaaccggaaaacagaccgcctaaacctgttataaaagaattatccgctttgtcgggtgctgatactgatttctgaacaggtgcggtaaccgtctgcttattgcttccgactgtcatctgccctacatccccaaaacatttatccagtttggagaaactgaaactacggtctatctccgaacccttgaacgtgtattcacctttggaaaaggaaacgccttgtatctcgcctgtctgtcccttgtacttgaaccggatagtaatacccttttccgctaaccgctcctgtaactgctgccagtttcgggatttcccgatttcattctttacagcgttgtaaatctcgtatttcgatttgtccagctctttcaagcggtgctgcttcacctgttcttttccaccagcgaaataaagcccgtgcttggctttcagcttcttgcatacctgctcgttacggtacatatcgttcctgtccgaaatggtcttgccgttgttgtcaatacggttgaatacgatatgcacatgtgggtgttcccggtcttgatggcgcacgatgatatactgcgtatcggtgattttcatttcacgcatatactcctgcgcaagctgtatcatcttcccgtctgtcaatttgggcgcatccactgccgaatagcttagcgcaatatgtccgactggcttttttaagtcgggattcatcccggtctgcatacagaagctgcggattatatctccccggctttctgttagtaccccctccgcatggagcaaagccgcctgttccttgccaagcacatagttcacgcagcccttaaacccgcttcccttttttatttttccaatcatccgacaactggtttataatttcgacaatcctgtttttcagtttcactagttccaccgccaccagtgcgaaacctccggcattcgcccggtgcgccaactggttgatgttgttggcttcccctgccagtttgcgaatggtgtccgcatccttcctgttcagccggggtatgacctctgccgaaacaactgcctgccgtacatactcactgacacgcaacccggcttctccggctcgctttctgatggcgtaatactgcaactcggtcagtttcgtactgacaacccgttgctgcttctctatccgtttctttgccggacgtccccccggcttatcctttatattcgtcataagtttttacgtttaaatagtgtcttaaaaattgcgaccaacgggagaaattttctttgcgatgagcaaagcaaggtagtttcggtttaccgaaacataaccttgctctccaaattaaaccgcctgccgttggtaatcctgccggactaaatccccctgccccttttctgtcttggggcggcacgttgtccggtttcctgctttatctcctgcacttggctggtgctgttcttctgttcctgcttcttgccgcacaggtaatcgttcaagtccgaatagcccctataattgcccgagaagtcacgcacatggaaggagtattccaatgcaatagcctgtgtcgccttataccccgtctcgtcattgtcaagcatacagtggatgcgttcatacgggtacagcacgtcaatggctttcggcacgttgacagtagagttgagtatgacataatcctgtctgtcaaggtcgggcatggtcggacagttcttcatccggaacgtgaggaaagaaagatagtccataaaaccctcgaataccaaacatttctctctcggctctccctgctgccgtatatgggtgatgtctttcggggcgatgcaacccttaaaaaaggaattgcgaacctcgtaacctcctgccatgttcgggaaaccgatagcaaagaatggtctgccgttattgataaaatggagttccttgcattctctttttgccagttcgacattgatacctcgtccctgcaagtaacggagcaatgccagatgggtcaagtcacggacttccaaatgttggaaactcggttctgtcctacgctggggaaaagaaaaactgaccggacggatgtgcggtgtctgttctgctatctggtttaaaaggtatggcacgctgccggagcaataaagttcctttgccagtgcaatgatgttgccgcccttacctgcgccaaagtcataccaaaggttgcggtcagtgttcaccttgaaagacggttcgtgttcctcccttaacggtgatttgtaccataagccgttgccctgctgcttgacaggagagtagcctaaactgtgcagatagtctgcgatgggtatttgtttcacatcttcgatattcataacattttctttttgggggattaaaaaatagttgaaaagtgcgccagtcctgtttagtccgttatatatatacccgtaccatactaaacctgcttgttccgatacagggaaatagtaagtccgttcctcttatatatacacccggactaaaccaaacggacttttaataatggaaatcgggattatagcggtagcccttgccctctttcacaatcatgcgcttgttcacaagaaacttgttaagtgacacaaggacattgcgtccacgctcgtagccgatactcgcataaccctgcttcaatgccgctatgacattggaatagccttgtaccacctgcttgccgaaaccgttctccaacgcttcccggtgttgctgttcagtcagttccgtaagcggaaaattcctgtcctgcttaggttgttggaatacataatcatccacgatttcgggtaaagcgttgtcattgatacggaatgcgaacgggtcaaactcccggtcacgtatgtgcattgcctttacctcgcttatgttgccgtcctgccggcttttcgtgatttgcaggacggtttcagccttgttgttcagttccgtgccgatatgcccccttgtgttgtcatcccccttattcaaatgtagaacagtatggatatgcaggttatatccgcttgaccagcgcatcaaaaggttgattaggtcggttgattcgctgggactgttgatgtcgtacatcaagtcacggattccgtcaatgatgagcaaccccacatcgggcatattttcaagcatatagccgataatctgtttccgcttgtcgggggtctgctctcttagcacgatgaaaacaaaatcgtccctgtccttgtcggtaggtagtccggcaagccgtaaaatacgctccatgaccttatggcaatggtatttgctctgctcggtatctacatagaggattttccgcttgttcggtggcaggtatgccgaatacttcagtacctcgtcattcttcaacgctgccgcaacgatagcggagatgttgaatgtctttttgctcttggctttacccgtggatgcgctgaaattacccagcgtgccaatggtagagccgttcacccagagtatttcgggcggcacttcgtaagtgtccgttacctttaaatgaatggttttccaaagggctgcgaaatcctctttctgtatggtaacaccctgcccggcttctgtcgcttttctattttccatagccgttatttctttagaggacggttaaggatatacttctgcgcttcctgctctatctgcgcctgcgtcttgaccgggttctgacgtaaccatgcttccaactccgctttctcaaaataaagcattttgccctgcggcttgtaatggggtatcaagttacccgaagtcaacttgtacaggtaacttttagaaaggttcaagaacttgctcgcttcatcgaagctaagcacactctttgaaaggaacaacatcttttcgagttcggaaactcttaactctaaatctctttccatattgtttaggaatttaggtgaaacaatatgaaggtgcgcaccctcgtttttttgttaacgggggcaaagttaagaggttgaaaatgaagtctaattgacctttgtttgagcgttcaatctatgctcaaccttttttcagttgtttgatgtatttgtctatgatttcatatcctttcggatagatgttttttgcttggtctgtcgcactcgacaggtcagtacgtgtaagcggttctccttttatcttcttcaatatcagcttattgtttgctatgacagactgccattcataaacgatgtaattataacagctaagttgcatcataagataggctaacagacgagtattattaactttcaataccccattcagtttgcagttgaaaaaatcggtaagtattttggcactgacggtagtagtaaacatattcgcttcattcacacagtcggtcagaagtttgatttcattggctttcaacgtggacttgaaaggattgcttttgcccacaatcttggttggattagtatctgcactttcctctttctcttttggcaagacttgctcttggatggcaaccgcatctgtatggtaattgctttcctgttcttgcagatagcgcaaatacttggaaagcacgacaagattaacgataatagacaaatagggaagccgcccatcataacaggacggttcatgcaaatatgcgtccatatcaaaatcagagcagcggaaaccgatatacttttttctttcatcagaattcaagtcctcaaaataaccgctttcccacaaaaaatcgggaatatccatatccaatacaatgttacacacgacacggtatttttgttggatggctacaatattttcagtcacacggaaaatttcttgccgcaaataatcctttagctgagcttgcgtcaaatattcacgttttaaaaatagtgcatctactttagttttatagtcatgagctatacaactatctaatatcttctgtatttctctgaaattgttttccatatgattttccataatcgtgcgcctttaaacgttcttactacaaatataaggtaagaatctcacttttcccgaaaacatcggcaataataaggtagataaagataggataagcgttaagaaattataaagatatggggaagaaaactattaaagtacaccttttctttgtattcgtcattcagtacacgtttagtacgccctataaaagcagaaaaccctaataatcaagtgattatcagggtttattcgtacccagacccggggtcgaaccgggatggaagtgaatccactggtgtttgagaccagcgcgtctaccgattccgccatctgggcgcatacttgatttctcaattgcggtgcaaagatacgacattattttgattccacaatagtttggcaaaaaaaaggagaaaaaaataataaaacatatcttaaacacttctctattcagagaataaaccgtacattagcagaaactttaaaatagagtcactatcatgacaaaccaggataattattgcgtgattatgggtggcggcattggaagccgcttctggccgtttagccgcaaaacattgcccaaacaattcttagatttcttcggaacgggccgttcacttttacaacagactttcgaccggttccaaaaggttatcccaacagaaaatattttcatcgttaccaatgcaatgtatgcggacttagtgaaggaacaattgcccgaagtgaacgaagaacagattctgctggaacccgcaagacgaaataccgctccgtgtatagcatgggccgcttaccacatccgggcactgaacccgaacgctaatatcgtagtcgctccttcagaccatttaattttaaaagaggatgagtttcttgccgctatcgaaaaaggacttgattttgtttcacgctcggaaaagctactgacattaggtattaaacccaatcgcccggaaacagggtacggatatatacaaatagacgaacccgcaggaggaaacttctataaagtaaaaacattcacagagaaaccggaactggaattagctaaagtattcgtagagagcggagaattttattggaattccggcctatttatgtggaatgtaaatacaatcatcaaagcaagtgaagatttactgcctgaattagcttccaaactggcaccgggaaaagatatttatgccaccgacaaggagaaagcattcatcgaagaaaacttcccagcatgtcctaatgtatccatcgacttcggcattatggagaaagcggataatgtgtatgtatcattaggagattttggctggtccgatcttggaacttggggatcactttatgatttatcggaaagagacccggaaggcaatgttacgctgaagtgccattcacttatatataatagtaaagataatatggtagtacttccgaaaggcaaactggccgttatcgatggactggaaggatttctgatagccgaatcggacaacgttcttttgatttgccgcaaagatgaagaacatgccatccgtaaatatgtaaacgacgcccaaatgcaactgggcgatgatttcatttaataacacgcaacctgacgccggagccaaaaccggataagaccatacaaatagtgaacggtgaacaaaccgcataattgattgcagagagttcaccgttcactgtttataatcgaaaaactttgtgtgtctttaaataatcatgagtctctaaataatctctattccctgctccttgcaaagttgcagtcccagatctttcaatctgaacttctgaatctttccactacccgtcatcgggaattcattcacaaagaaaatatatttcggaatcttataacgggatatcttatttctgcagaaatcacgtacatcggcttcctgcatttgtactccttcctgcaaaataataaatgctccgactgcctcaccatactttttagaaggaataccagctacttgaacatctttcactccgtcaagcttataaagaaactcttctatttcgcgcggataaatattctcgccaccacgaataatcatatctttgatacgtccggtaatccgataatttccatcttcatccttaatacccaagtcgccggaatgcaagaagttgttttcatcaagcacttccgccgttgcttccggattcttataatatcctttcatggtattataaccacggttacacatttcaccttgtacaccaaccggacattcttcacctgtttcaggatcaatcaccttcacctccgtaaattcgaaatcatgtcctaccgtattacaacgtacatcgaacggatcatcaatacgggtggccgtcataccgggagcggcttctgtcaatccgtagacactagtcaccttcatatacattttctcttctacctgcttcattagttcgacaggacacagcgaacccgccataatacctgtacgaagacaagacatatcaaagagatcgaacatcggatgatgcaactcggcgataaacatagtcggcacaccataaagagccgtacaacgttctttgtgaatagaggccagcacaaccaacgggtcgaaacgttctaccatcacttgtgtacaaccatgagtcagacagttcatggtagccaatactaccccaaaacaatggaacaacggaacgcaacaacaaagtttgtcatctgccgtgaacttcatgtgttcccccgtcagaaatccattattggcaatattataatgtgtcagcatcacccctttcgggaagccggtagtgcccgacgtatattgcatatttactacatcgtgacaatccactttgctttttagttcattcaaacagtcatcttccacattatctcccaacagcaggatctccgctgtattatacataccacgatgtttttcctgacctacatatactacatttcgcatatatggaaagcgttcgctctttaaatgtccacgctcacaagtcttcaattcaggaagcatcgtgtatgtcatctgcacaaaatcactatccttctcaccattcacaatacaaagcgtatgcatatccgagttctggcaaagatactccaattccgattgcttgtagttcgtattcactgtaacatataccgcaccaatcttcgcgcaggcatatagcaatgtcaaccaatcgggaacattagccgcccagatacccacatgagtaccacgttccaccccaatggcaataagcccttttgccatatcatccacacgacggttcaactgactccaggtaaaacggagatttcggtcggaatatacgatatattccttatcgggagtctcttcagcccagtgctccagccactgccccaaagtacgatcaaataattgcatgtaattatacttaagtcttggttcctactatttcattaaatcggtgtgtaaactactgccaggatttttgcagcctgtccctcataagcatgtacatgatgaggaacaatggaatcataataaatactatcaccctcttccagcagataggtgttcttgccatagctgatttccatgataccttccataaccatgataaactcttctccttcatgagaagaaagcacgaagtcagtatcttccgtcggcatcacatcgataataaacggttccatgtgacggtccgcctttgacttggacaacgagtgatattccatgtgtttgcgagagtgaatcgcattattggaaaaactgatcgcatccttggcctctttcttacggcatacgaccggtccgacttcatcctgatcatcaaggaaagtacccagacgtactcccaacacacgcgcaatcttaatcagcggtgcgagagaaggtatatcaatgttattctcaatacgttcaacctgttcgagagccaaacctgaacgttgcgccaactcttctatgcttattgatttatcttcgcggagggctttaattttttcgccaacaatcttacttgtatccattttgaaagcattttagttatcaaaggtgataaattataataattaagctgcaaaaatagcaaaatctttagatgaacacaattataaccgaagaaaatacgactatcaggaagaaaaagaagaaactaaaaaaaagccgctcctctatcatgaggaacggctttaaatcttttcgcgacaagtagattacttacgcaaaccgagctctttaacaatagcacgatatctttcgatatctcttgctttcaggtagtcgagtaagcgacgacgcttacctaccaacattgttaacgctctttcagtactataatcttttctgttgagcttcatgtgctcagtcaggtgagaaatacggtaggaaaacaatgccacttgggcctcagctgagccggtgtcagtgttagactttccgtactttctgaagatttcttgctttttagcagcgtctaaatacataattcttagaattttaattgataaattattcttttgagcgtgcaaagataggcattatctttatatcacacaacgatttacaagaaaaaattgctatcattgcgcatatttctaatcctattttcgtacctttgcagccaaataataggtattatatgcaaaatattcgaaacattgcaatcattgcccatgttgaccatgggaaaacaacgctggttgacaagatgctattagccggaaatttattccgcagcaaccaaaatagtggtgaacttatcctggataacaacgatttggaacgtgaacgtggtataacgattctctccaaaaacgtatccatcaattacaacggtacaaaaattaatattattgatactccgggacacagcgacttcggtggtgaggtagaacgtgtattgaatatggccgatggctgtattctgttggtagatgccttcgaaggtccgatgccacagactcgtttcgtactgcaaaaagcgctcgaaatcggtttgaaacccattgtggtagttaataaggtagat
